(19) United States
(12) Patent Application Publication
(10) Pub. No.: US 2024/0384273 A1
(43) Pub. Date: Nov. 21, 2024

(54) HSD17B13-RELATED DOUBLE STRANDED OLIGONUCLEOTIDE COMPOSITIONS AND METHODS RELATING THERETO

(71) Applicant: Wave Life Sciences Ltd., Singapore (SG)

(72) Inventors: Chandra Vargeese, Schwenksville, PA (US); Naoki Iwamoto, Boston, MA (US); Wei Liu, Waltham, MA (US); Mugdha Bedekar, Cambridge, MA (US); Brett Schrand, Reading, MA (US); Priyank Shiva Prakasha, Cambridge, MA (US); Anthony Lamattina, Amherst, NH (US); Luciano H. Apponi, Lynn, MA (US)

(73) Assignee: Wave Life Sciences Ltd., Singapore (SG)

(21) Appl. No.: 18/667,824

(22) Filed: May 17, 2024

Related U.S. Application Data
(63) Continuation of application No. PCT/US2022/050371, filed on Nov. 18, 2022.
(60) Provisional application No. 63/377,482, filed on Sep. 28, 2022.
(60) Provisional application No. 63/268,775, filed on Mar. 2, 2022.
(60) Provisional application No. 63/264,360, filed on Nov. 19, 2021.

(51) Int. Cl. C12N 15/113

(52) U.S. Cl. CPC C12N 15/1137; C12N 2310/14; C12N 2310/315; C12Y 101/01062

(57) ABSTRACT

The present disclosure provides HSD17B13-related double stranded oligonucleotides, compositions, and methods of using such double stranded oligonucleotides and compositions for preventing and/or treating various conditions, disorders, or diseases associated with expression of HSD17B13. In some embodiments, the provided double stranded oligonucleotides and compositions comprise nucleobase modifications, sugar modifications, internucleotidic linkage modifications and/or patterns thereof, and have improved properties, activities and/or selectivities. In some embodiments, the provided double stranded oligonucleotides and compositions target HSD17B13.

### CROSS-REFERENCE TO RELATED APPLICATIONS

[0001] This application is a continuation of International Application No. PCT/US2022/050371 filed Nov. 18, 2022, which claims priority to U.S. Provisional Application No. 63/264,360, filed Nov. 19, 2021, U.S. Provisional Application No. 63/268,775, filed Mar. 2, 2022, and U.S. Provisional Application No. 63/377,482, filed Sep. 28, 2022, the contents of each of which are incorporated by reference in their entirety, and to which priority is claimed.

### SEQUENCE LISTING

[0002] The present application contains a Sequence Listing which has been submitted via EFS-Web and is hereby incorporated by reference in its entirety. Said Sequence Listing, created on May 17, 2024, is named 0882900165.xml and is 12,751,366 bytes in size.

### TECHNICAL FIELD

[0003] Among other things, the present disclosure provides double stranded (ds) oligonucleotides, compositions and methods (e.g., of preparation, use, etc.) thereof. In some embodiments, provided technologies are useful for preventing and/or treating various conditions, disorders, or diseases associated with hydroxysteroid 17-beta dehydrogenase 13 (HSD17B13) expression.

### BACKGROUND

[0004] Double stranded (ds) oligonucleotides are useful in various applications, e.g., therapeutic, diagnostic, and/or research applications. For example, ds oligonucleotides targeting HSD17B13 can be useful for treatment of conditions, disorders, or diseases associated with expression of HSD17B13, e.g., nonalcoholic fatty liver disease (NAFLD), nonalcoholic steatohepatitis (NASH), alcoholic steatohepatitis (ASH), alcoholic liver disease, nonalcoholic liver disease, alcoholic cirrhosis, nonalcoholic cirrhosis, steatohepatitis, hepatic steatosis, hepatoceullar carcinoma, HCV hepatitis, chronic hepatitis, hereditary hemochromatosis, primary sclerosing cholangitis, drug induced liver injury, or hepatocellular necrosis.

### SUMMARY

[0005] In some embodiments, the present disclosure provides ds oligonucleotides targeting HSD17B13 and compositions thereof that have significantly improved properties and/or high activities. Among other things, the present disclosure provides technologies for designing, manufacturing and utilizing such ds oligonucleotides and compositions. Particularly, in some embodiments, the present disclosure provides ds oligonucleotides comprising useful patterns of internucleotidic linkages and/or patterns of sugar modifications, which, when combined with one or more other structural elements, e.g., base sequence (or portion thereof), nucleobase modifications (and patterns thereof), additional chemical moieties, etc., can provide ds oligonucleotides targeting HSD17B13 and compositions thereof with high activities and/or desired properties, including but not limited to effective and efficient reduction of expression, levels and/or activities of HSD17B13 transcripts and products encoded thereby. In some embodiments, ds oligonucleotides targeting HSD17B13 and compositions reduce levels of a HSD17B13 transcript, and are useful for treating and/or preventing HSD17B13-associated condition, disorder, or disease, e.g., NAFLD, NASH, ASH, alcoholic liver disease, nonalcoholic liver disease, alcoholic cirrhosis, nonalcoholic cirrhosis, steatohepatitis, hepatic steatosis, hepatoceullar carcinoma, HCV hepatitis, chronic hepatitis, hereditary hemochromatosis, primary sclerosing cholangitis, drug induced liver injury, or hepatocellular necrosis.

[0006] In some embodiments, a ds oligonucleotide targeting HSD17B13 is capable of mediating knockdown of HSD17B13, wherein the level, expression and/or activity of HSD17B13 or a product thereof are decreased. In some embodiments, a ds oligonucleotide targeting HSD17B13 is capable of mediating pan-specific knockdown of HSD17B13, wherein the level, expression and/or activity of multiple or all HSD17B13 alleles are decreased. In some embodiments, a ds oligonucleotide targeting HSD17B13 has a base sequence that is complementary to a sequence which is common in multiple or all HSD17B13 alleles. In certain embodiments, such structural elements include one or more of: (1) chemical modifications (e.g., modifications of a sugar, base and/or internucleotidic linkage) and patterns thereof; and (2) alterations in stereochemistry (e.g., stereochemistry of a backbone chiral internucleotidic linkage) and patterns thereof. One or more of such structural elements can, in certain embodiments, be independently present in one or both oligonucleotides of a ds oligonucleotide. In certain embodiments, the properties and/or activities impacted by such structural elements include, but are not limited to, participation in, direction of a decrease in expression, activity or level of a gene or a gene product thereof, mediated, for example, by RNA interference (RNAi interference).

[0007] In certain embodiments, the present disclosure demonstrates that compositions comprising ds oligonucleotides (e.g., dsRNAi oligonucleotides, also referred to as dsRNAi agents) with controlled structural elements provide unexpected properties and/or activities.

[0008] In certain embodiments, the present disclosure encompasses the recognition that stereochemistry, e.g., stereochemistry of backbone chiral centers, can unexpectedly maintain or improve properties of ds oligonucleotides. For example, but not by way of limitation, the instant disclosure relates, in part, to ds oligonucleotides comprising one or more of:
[0009] (1) a guide strand comprising backbone phosphorothioate chiral centers in Sp configuration between the 3′ terminal nucleotide and the penultimate (N-1) nucleotide and as between the penultimate (N-1) nucleotide and the immediately upstream, i.e., in the 5′ direction, (N-2) nucleotide;
[0010] (2) a guide strand comprising backbone phosphorothioate chiral centers in Rp, Sp, or alternating configurations between the 5′ terminal (+1) nucleotide and the immediately downstream, i.e., in the 3′ direction, (+2) nucleotide and between the +2 nucleotide and the immediately downstream (+3) nucleotide;
[0011] (3) a guide strand comprising one or more backbone phosphorothioate chiral centers upstream, i.e., in the 5′ direction, relative to backbone phosphorothioate chiral centers in Sp configuration between the 3′ terminal nucleotide and the penultimate (N-1) nucleotide and as between the penultimate (N-1) nucleotide and the immediately upstream (N-2) nucleotide, where the upstream backbone phosphorothioate chiral centers are in Rp or Sp configuration;
[0012] (4) a guide strand comprising one or more backbone phosphorothioate chiral centers in Rp or Sp configuration between the 5′ terminal (+1) nucleotide and the immediately downstream (+2) nucleotide and between the +2 nucleotide and the immediately downstream (+3) nucleotide, as well as between one or both of: (a) the +3 nucleotide and the +4 nucleotide; and (b) the +5 nucleotide and the +6 nucleotide;
[0013] (5) a passenger strand in combination with one or more of the aforementioned guide strands, comprising one or more backbone chiral centers in Rp or Sp configuration; and
[0014] (6) a passenger strand in combination with one or more of the aforementioned guide strands, comprising backbone phosphorothioate chiral centers in the Sp configuration between the 5′ terminal (+1) nucleotide and the immediately downstream, i.e., in the 3′ direction, (+2) nucleotide and between the 3′ terminal nucleotide and the penultimate (N-1) nucleotide;
   wherein the ds oligonucleotide further comprises one or more of:
[0015] (1) a guide strand where one or both of the 5′ and 3′ terminal dinucleotides are not linked by a Rp, Sp, or stereorandom non-negatively charged internucleotidic linkages, i.e., the guide strand comprises one or more Rp, Sp, or stereorandom non-negatively charged internucleotidic linkages downstream, i.e., in the 3′ direction, relative to the linkage between the 5′ terminal dinucleotide and/or upstream, i.e., in the 5′ direction, relative to the linkage between the 3′ terminal dinucleotide;
[0016] (2) a guide strand where one or more Rp, Sp, or stereorandom non-negatively charged internucleotidic linkage occurs between any two adjacent nucleotides between the second (+2) nucleotide relative to the 5′ terminal nucleotide of the guide strand and the penultimate 3′ (N-1) nucleotide of the guide strand, where N is the 3′ terminal nucleotide;
[0017] (3) a guide strand where an Rp, Sp, or stereorandom non-negatively charged internucleotidic linkage occurs between the third (+3) and fourth (+4) nucleotides, relative to the 5′ terminal nucleotide, of the guide strand and/or between the tenth (+10) and eleventh (+11) nucleotides, relative to the 5′ terminal nucleotide;
[0018] (4) a passenger strand where one or more Rp, Sp, or stereorandom non-negatively charged internucleotidic linkage occurs upstream, i.e., in the 5′ direction, relative to the central nucleotide of the passenger strand; and
[0019] (5) Passenger strand where one or more Rp, Sp, or stereorandom non-negatively charged internucleotidic linkage occurs downstream, i.e., in the 3′ direction, relative to the central nucleotide of the passenger strand, and
   wherein the ds oligonucleotide further comprises a 2′ modification, e.g., a 2′ F modification, of the 3′ nucleotide of a nucleotide pair linked by a Rp, Sp, or stereorandom non-negatively charged internucleotidic linkage. In certain embodiments, the one or more Rp, Sp, or stereorandom non-negatively charged internucleotidic linkage incorporated into the guide or passenger strand is an Rp non-negatively charged internucleotidic linkage. In certain embodiments, the one or more Rp, Sp, or stereorandom non-negatively charged internucleotidic linkage is an Sp non-negatively charged internucleotidic linkage. In certain embodiments, the one or more Rp, Sp, or stereorandom non-negatively charged internucleotidic linkage is a stereorandom non-negatively charged internucleotidic linkage.

[0020] In certain embodiments, the present disclosure encompasses the recognition that stereochemistry, e.g., stereochemistry of chiral centers at a 5′ terminal modification of guide strands, can unexpectedly maintain or improve properties of the ds oligonucleotides described herein. For example, but not by way of limitation, the instant disclosure relates, in part, to ds oligonucleotides comprising a guide stranding comprising: (1) a phosphorothioate chiral center in Rp or Sp configuration; (2) an Rp, Sp, or stereorandom non-negatively charged internucleotidic linkage where the 3′ nucleotide of a nucleotide pair linked by an Rp, Sp, or stereorandom non-negatively charged internucleotidic linkage comprises a 2′ modification, e.g., a 2′ F; and (3) a 5′ terminal modification selected from: a
[0021] (a) 5′ PO modifications, such as, but not limited to:

[chemical structure]

[0022] (b) 5′ VP modifications, such as, but not limited to:

[chemical structure]

[0023] (c) 5′ MeP modifications, such as, but not limited to:

[chemical structure]

[0024] (d) 5′ PN and 5′ Trizole-P modifications, such as, but not limited to:

[chemical structure]

wherein Base is selected from A, C, G, T, U, abasic and modified nucleobases;
R^{2′} is selected from H, OH, O-alkyl, F, MOE, locked nucleic acid (LNA) bridges and bridged nucleic acid (BNA) bridges to the 4′ C, such as, but not limited to:

[chemical structure]

[0025] In certain embodiments, the one or more Rp, Sp, or stereorandom non-negatively charged internucleotidic linkage incorporated into the guide strand is an Rp non-negatively charged internucleotidic linkage. In certain embodiments, the one or more Rp, Sp, or stereorandom non-negatively charged internucleotidic linkage is an Sp non-negatively charged internucleotidic linkage. In certain embodiments, the one or more Rp, Sp, or stereorandom non-negatively charged internucleotidic linkage is a stereorandom non-negatively charged internucleotidic linkage.

[0026] In certain other embodiments, the present disclosure encompasses the recognition that stereochemistry, e.g., stereochemistry of chiral centers at the 5′ terminal nucleotide of guide strands, can unexpectedly maintain or improve properties of ds oligonucleotides wherein the guide strand of the ds oligonucleotide also comprises a phosphorothioate chiral center in Rp or Sp configuration. For example, but not by way of limitation, the instant disclosure relates, in part, to ds oligonucleotides comprising a guide stranding comprising: (1) a phosphorothioate chiral center in Rp or Sp configuration; (2) an Rp, Sp, or stereorandom non-negatively charged internucleotidic linkage where the 3′ nucleotide of a nucleotide pair linked by an Rp, Sp, or stereorandom non-negatively charged internucleotidic linkage comprises a 2′ modification, e.g., a 2′ F; and (3) a 5′ terminal modification selected from:
[0027] (a) 5′ PO nucleotides, such as, but not limited to:

[chemical structure]

[0028] (b) 5′ VP nucleotides, such as, but not limited to:

[chemical structure]

[0029] (c) 5′ MeP nucleotides, such as, but not limited to:

[chemical structure]

[0030] (d) 5′ PN and 5′ Trizole-P nucleotides, such as, but not limited to:

[chemical structure]

[0031] (e) 5′ abasic VP and 5′ abasic MeP nucleotides, such as, but not limited to:

[chemical structure]

[0032] In certain embodiments, the one or more Rp, Sp, or stereorandom non-negatively charged internucleotidic linkage incorporated into the guide strand is an Rp non-negatively charged internucleotidic linkage. In certain embodiments, the one or more Rp, Sp, or stereorandom non-negatively charged internucleotidic linkage is an Sp non-negatively charged internucleotidic linkage. In certain embodiments, the one or more Rp, Sp, or stereorandom non-negatively charged internucleotidic linkage is a stereorandom non-negatively charged internucleotidic linkage.

[0033] In certain embodiments, the present disclosure encompasses the recognition that non-naturally occurring internucleotidic linkages, e.g., neutral internucleotidic linkages, can, in certain embodiments, be used to link one or more molecules to the double-stranded oligonucleotides described herein. In certain embodiments, such linked molecules can facilitate targeting and/or delivery of the double-stranded oligonucleotide. For example, but not limitation, such linked molecules an include lipophilic molecules. In certain embodiments, the linked molecule is a molecule comprising one or more GalNAc moieties. In certain embodiments, the linked molecule is a receptor. In certain embodiments, the linked molecule is a receptor ligand.

[0034] In certain embodiments, the present disclosure provides technologies for incorporating various additional chemical moieties into ds oligonucleotides. In certain embodiments, the present disclosure provides, for example, reagents and methods for introducing additional chemical moieties through nucleobases (e.g., by covalent linkage, optionally via a linker, to a site on a nucleobase).

[0035] In certain embodiments, the present disclosure provides technologies, e.g., ds oligonucleotide compositions and methods thereof, that achieve allele-specific suppression, wherein transcripts from one allele of a particular target gene is selectively knocked down relative to at least one other allele of the same gene.

[0036] Among other things, the present disclosure provides structural elements, technologies and/or features that can be incorporated into ds oligonucleotides and can impart or tune one or more properties thereof (e.g., relative to an otherwise identical ds oligonucleotide lacking the relevant technology or feature). In certain embodiments, the present disclosure documents that one or more provided technologies and/or features can usefully be incorporated into ds oligonucleotides of various sequences.

[0037] In certain embodiments, the present disclosure demonstrates that certain provided structural elements, technologies and/or features are particularly useful for ds oligonucleotides that participate in and/or direct RNAi mechanisms (e.g., RNAi agents). Regardless, however, the teachings of the present disclosure are not limited to ds oligonucleotides that participate in or operate via any particular mechanism. In certain embodiments, the present disclosure pertains to any ds oligonucleotide, useful for any purpose, which operates through any mechanism, and which comprises any sequence, structure or format (or portion thereof) described herein. In certain embodiments, the present disclosure provides a ds oligonucleotide, useful for any purpose, which operates through any mechanism, and which comprises any sequence, structure or format (or portion thereof) described herein, comprising one or more of:
[0038] (1) a guide strand comprising backbone phosphorothioate chiral centers in Sp configuration between the 3′ terminal nucleotide and the penultimate (N-1) nucleotide and as between the penultimate (N-1) nucleotide and the immediately upstream, i.e., in the 5′ direction, (N-2) nucleotide;
[0039] (2) a guide strand comprising backbone phosphorothioate chiral centers in Rp, Sp, or alternating configurations between the 5′ terminal (+1) nucleotide and the immediately downstream, i.e., in the 3′ direction, (+2) nucleotide and between the +2 nucleotide and the immediately downstream (+3) nucleotide;
[0040] (3) a guide strand comprising one or more backbone phosphorothioate chiral centers upstream, i.e., in the 5′ direction, relative to backbone phosphorothioate chiral centers in Sp configuration between the 3′ terminal nucleotide and the penultimate (N-1) nucleotide and as between the penultimate (N-1) nucleotide and the immediately upstream (N-2) nucleotide, where the upstream backbone phosphorothioate chiral centers are in Rp or Sp configuration;
[0041] (4) a guide strand comprising one or more backbone phosphorothioate chiral centers in Rp or Sp configuration between the 5′ terminal (+1) nucleotide and the immediately downstream (+2) nucleotide and between the +2 nucleotide and the immediately downstream (+3) nucleotide, as well as between one or both of: (a) the +3 nucleotide and the +4 nucleotide; and (b) the +5 nucleotide and the +6 nucleotide;
[0042] (5) a passenger strand in combination with one or more of the aforementioned guide strands, comprising one or more backbone chiral centers in Rp or Sp configuration; and
[0043] 6) a passenger strand in combination with one or more of the aforementioned guide strands, comprising backbone phosphorothioate chiral centers in the Sp configuration between the 5′ terminal (+1) nucleotide and the immediately downstream, i.e., in the 3′ direction, (+2) nucleotide and between the 3′ terminal nucleotide and the penultimate (N-1) nucleotide;
   wherein the ds oligonucleotide further comprises one or more of:
[0044] (1) a guide strand where one or both of the 5′ and 3′ terminal dinucleotides are not linked by non-negatively charged internucleotidic linkages, i.e., the guide strand comprises one more Rp, Sp, or stereorandom non-negatively charged internucleotidic linkages downstream, i.e., in the 3′ direction, relative to the linkage between the 5′ terminal dinucleotide and/or upstream, i.e., in the 5′ direction, relative to the linkage between the 3′ terminal dinucleotide;
[0045] (2) a guide strand where one or more Rp, Sp, or stereorandom non-negatively charged internucleotidic linkage occurs between any two adjacent nucleotides between the second (+2) nucleotide relative to the 5′ terminal nucleotide of the guide strand and the penultimate 3′ (N-1) nucleotide of the guide strand, where N is the 3′ terminal nucleotide;
[0046] (3) a guide strand where an Rp, Sp, or stereorandom non-negatively charged internucleotidic linkage occurs between the third (+3) and fourth (+4) nucleotides, relative to the 5′ terminal nucleotide, of the guide strand and/or between the tenth (+10) and eleventh (+11) nucleotides, relative to the 5′ terminal nucleotide;
[0047] (4) a passenger strand where one or more Rp, Sp, or stereorandom non-negatively charged internucleotidic linkage occurs upstream, i.e., in the 5′ direction, relative to the central nucleotide of the passenger strand; and
[0048] (5) Passenger strand where one or more Rp, Sp, or stereorandom non-negatively charged internucleotidic linkage occurs downstream, i.e., in the 3′ direction, relative to the central nucleotide of the passenger strand, and
   wherein the ds oligonucleotide further comprises a 2′ modification, e.g., a 2′ F modification, of the 3′ nucleotide of a nucleotide pair linked by an Rp, Sp, or stereorandom non-negatively charged internucleotidic linkage. In certain embodiments, the one or more Rp, Sp, or stereorandom non-negatively charged internucleotidic linkage incorporated into the guide or passenger strand is an Rp non-negatively charged internucleotidic linkage. In certain embodiments, the one or more Rp, Sp, or stereorandom non-negatively charged internucleotidic linkage is an Sp non-negatively charged internucleotidic linkage. In certain embodiments, the one or more Rp, Sp, or stereorandom non-negatively charged internucleotidic linkage is a stereorandom non-negatively charged internucleotidic linkage.

[0049] In certain embodiments, the provided ds oligonucleotides may participate in (e.g., direct) RNAi mechanisms.

[0050] In certain embodiments, the guide strand comprises backbone phosphorothioate chiral centers in Sp configuration between the 3′ terminal nucleotide and the penultimate (N-1) nucleotide and as between the penultimate (N-1) nucleotide and the immediately upstream (N-2) nucleotide, and one or more of:
[0051] (1) a guide strand where one or both of the 5′ and 3′ terminal dinucleotides are not linked by non-negatively charged internucleotidic linkages, i.e., the guide strand comprises one more non-negatively charged internucleotidic linkages downstream, i.e., in the 3′ direction, relative to the linkage between the 5′ terminal dinucleotide and/or upstream, i.e., in the 5′ direction, relative to the linkage between the 3′ terminal dinucleotide;
[0052] (2) a guide strand where one or more Rp, Sp, or stereorandom non-negatively charged internucleotidic linkage occurs between any two adjacent nucleotides between the second (+2) nucleotide relative to the 5′ terminal nucleotide of the guide strand and the penultimate 3′ (N-1) nucleotide of the guide strand, where N is the 3′ terminal nucleotide;
[0053] (3) a guide strand where an Rp, Sp, or stereorandom non-negatively charged internucleotidic linkage occurs between the third (+3) and fourth (+4) nucleotides, relative to the 5′ terminal nucleotide, of the guide strand and/or between the tenth (+10) and eleventh (+11) nucleotides, relative to the 5′ terminal nucleotide;
[0054] (4) a passenger strand where one or more Rp, Sp, or stereorandom non-negatively charged internucleotidic linkage occurs upstream, i.e., in the 5′ direction, relative to the central nucleotide of the passenger strand; and
[0055] (5) Passenger strand where one or more Rp, Sp, or stereorandom non-negatively charged internucleotidic linkage occurs downstream, i.e., in the 3′ direction, relative to the central nucleotide of the passenger strand, and
   wherein the ds oligonucleotide further comprises a 2′ modification, e.g., a 2′ F modification, of the 3′ nucleotide of a nucleotide pair linked by an Rp, Sp, or stereorandom non-negatively charged internucleotidic linkage, and the passenger strand comprises 0-n Rp, Sp, or stereorandom non-negatively charged internucleotidic linkages, where n is about 1 to 49,

[0056] In certain embodiments, the present disclosure demonstrates that compositions comprising ds oligonucleotides (e.g., dsRNAi oligonucleotides, also referred to as dsRNAi agents) with controlled structural elements provide unexpected properties and/or activities.

[0057] In certain embodiments, the guide strand comprises backbone phosphorothioate chiral centers in Rp, Sp, or alternating configurations between the 5′ terminal (+1) nucleotide and the immediately downstream (+2) nucleotide and between the +2 nucleotide and the immediately downstream (+3) nucleotide, and one or more of:
[0058] (1) a guide strand where one or both of the 5′ and 3′ terminal dinucleotides are not linked by non-negatively charged internucleotidic linkages, i.e., the guide strand comprises one more non-negatively charged internucleotidic linkages downstream, i.e., in the 3′ direction, relative to the linkage between the 5′ terminal dinucleotide and/or upstream, i.e., in the 5′ direction, relative to the linkage between the 3′ terminal dinucleotide;
[0059] (2) a guide strand where one or more Rp, Sp, or stereorandom non-negatively charged internucleotidic linkage occurs between any two adjacent nucleotides between the second (+2) nucleotide relative to the 5′ terminal nucleotide of the guide strand and the penultimate 3′ (N-1) nucleotide of the guide strand, where N is the 3′ terminal nucleotide;
[0060] (3) a guide strand where an Rp, Sp, or stereorandom non-negatively charged internucleotidic linkage occurs between the third (+3) and fourth (+4) nucleotides, relative to the 5′ terminal nucleotide, of the guide strand and/or between the tenth (+10) and eleventh (+11) nucleotides, relative to the 5′ terminal nucleotide;
[0061] (4) a passenger strand where one or more Rp, Sp, or stereorandom non-negatively charged internucleotidic linkage occurs upstream, i.e., in the 5′ direction, relative to the central nucleotide of the passenger strand; and
[0062] (5) Passenger strand where one or more Rp, Sp, or stereorandom non-negatively charged internucleotidic linkage occurs downstream, i.e., in the 3′ direction, relative to the central nucleotide of the passenger strand, and
   wherein the ds oligonucleotide further comprises a 2′ modification, e.g., a 2′ F modification, of the 3′ nucleotide of a nucleotide pair linked by an Rp, Sp, or stereorandom non-negatively charged internucleotidic linkage, and the passenger strand comprises 0-n Rp, Sp, or stereorandom non-negatively charged internucleotidic linkages, where n is about 1 to 49. In certain embodiments, the one or more Rp, Sp, or stereorandom non-negatively charged internucleotidic linkage incorporated into the guide or passenger strand is an Rp non-negatively charged internucleotidic linkage. In certain embodiments, the one or more Rp, Sp, or stereorandom non-negatively charged internucleotidic linkage is an Sp non-negatively charged internucleotidic linkage. In certain embodiments, the one or more Rp, Sp, or stereorandom non-negatively charged internucleotidic linkage is a stereorandom non-negatively charged internucleotidic linkage.

[0063] In certain embodiments, the guide strand comprises one or more backbone phosphorothioate chiral centers in Rp or Sp configuration upstream of backbone phosphorothioate chiral centers in Sp configuration between the 3′ terminal nucleotide and the penultimate (N-1) nucleotide and as between the penultimate (N-1) nucleotide and the immediately upstream (N-2) nucleotide, and one or more of:
[0064] (1) a guide strand where one or both of the 5′ and 3′ terminal dinucleotides are not linked by non-negatively charged internucleotidic linkages, i.e., the guide strand comprises one more non-negatively charged internucleotidic linkages downstream, i.e., in the 3′ direction, relative to the linkage between the 5′ terminal dinucleotide and/or upstream, i.e., in the 5′ direction, relative to the linkage between the 3′ terminal dinucleotide;
[0065] (2) a guide strand where one or more Rp, Sp, or stereorandom non-negatively charged internucleotidic linkage occurs between any two adjacent nucleotides between the second (+2) nucleotide relative to the 5′ terminal nucleotide of the guide strand and the penultimate 3′ (N-1) nucleotide of the guide strand, where N is the 3′ terminal nucleotide;
[0066] (3) a guide strand where an Rp, Sp, or stereorandom non-negatively charged internucleotidic linkage occurs between the third (+3) and fourth (+4) nucleotides, relative to the 5′ terminal nucleotide, of the guide strand and/or between the tenth (+10) and eleventh (+11) nucleotides, relative to the 5′ terminal nucleotide;
[0067] (4) a passenger strand where one or more Rp, Sp, or stereorandom non-negatively charged internucleotidic linkage occurs upstream, i.e., in the 5′ direction, relative to the central nucleotide of the passenger strand; and
[0068] (5) Passenger strand where one or more Rp, Sp, or stereorandom non-negatively charged internucleotidic linkage occurs downstream, i.e., in the 3′ direction, relative to the central nucleotide of the passenger strand, and
   wherein the ds oligonucleotide further comprises a 2′ modification, e.g., a 2′ F modification, of the 3′ nucleotide of a nucleotide pair linked by an Rp, Sp, or stereorandom non-negatively charged internucleotidic linkage, and the passenger strand comprises 0-n Rp, Sp, or stereorandom non-negatively charged internucleotidic linkages, where n is about 1 to 49. In certain embodiments, the one or more Rp, Sp, or stereorandom non-negatively charged internucleotidic linkage incorporated into the guide or passenger strand is an Rp non-negatively charged internucleotidic linkage. In certain embodiments, the one or more Rp, Sp, or stereorandom non-negatively charged internucleotidic linkage is an Sp non-negatively charged internucleotidic linkage. In certain embodiments, the one or more Rp, Sp, or stereorandom non-negatively charged internucleotidic linkage is a stereorandom non-negatively charged internucleotidic linkage.

[0069] In certain embodiments, the guide strand comprises one or more Rp, Sp, or stereorandom non-negatively charged internucleotidic linkage occurs between the second (+2) and third (+3) nucleotides, relative to the 5′ terminal nucleotide, of the guide strand and the internucleotidic linkage to the penultimate 3′ (N-1) nucleotide, and one or more of:
[0070] (1) a guide strand where one or both of the 5′ and 3′ terminal dinucleotides are not linked by non-negatively charged internucleotidic linkages, i.e., the guide strand comprises one more non-negatively charged internucleotidic linkages downstream, i.e., in the 3′ direction, relative to the linkage between the 5′ terminal dinucleotide and/or upstream, i.e., in the 5′ direction, relative to the linkage between the 3′ terminal dinucleotide;
[0071] (2) a guide strand where one or more Rp, Sp, or stereorandom non-negatively charged internucleotidic linkage occurs between any two adjacent nucleotides between the second (+2) nucleotide relative to the 5′ terminal nucleotide of the guide strand and the penultimate 3′ (N-1) nucleotide of the guide strand, where N is the 3′ terminal nucleotide;
[0072] (3) a guide strand where an Rp, Sp, or stereorandom non-negatively charged internucleotidic linkage occurs between the third (+3) and fourth (+4) nucleotides, relative to the 5′ terminal nucleotide, of the guide strand and/or between the tenth (+10) and eleventh (+11) nucleotides, relative to the 5′ terminal nucleotide;
[0073] (4) a passenger strand where one or more Rp, Sp, or stereorandom non-negatively charged internucleotidic linkage occurs upstream, i.e., in the 5′ direction, relative to the central nucleotide of the passenger strand; and
[0074] (5) Passenger strand where one or more Rp, Sp, or stereorandom non-negatively charged internucleotidic linkage occurs downstream, i.e., in the 3′ direction, relative to the central nucleotide of the passenger strand, and
   wherein the ds oligonucleotide further comprises a 2′ modification, e.g., a 2′ F modification, of the 3′ nucleotide of a nucleotide pair linked by an Rp, Sp, or stereorandom non-negatively charged internucleotidic linkage, and the passenger strand comprises 0-n Rp, Sp, or stereorandom non-negatively charged internucleotidic linkages, where n is about 1 to 49. In certain embodiments, the one or more Rp, Sp, or stereorandom non-negatively charged internucleotidic linkage incorporated into the guide or passenger strand is an Rp non-negatively charged internucleotidic linkage. In certain embodiments, the one or more Rp, Sp, or stereorandom non-negatively charged internucleotidic linkage is an Sp non-negatively charged internucleotidic linkage. In certain embodiments, the one or more Rp, Sp, or stereorandom non-negatively charged internucleotidic linkage is a stereorandom non-negatively charged internucleotidic linkage.

[0075] In certain embodiments, the guide strand comprises backbone phosphorothioate chiral centers in Sp configuration between the 3′ terminal nucleotide and the penultimate (N-1) nucleotide and as between the penultimate (N-1) nucleotide and the immediately upstream (N-2) nucleotide, and one or more of:
[0076] (1) a guide strand where one or both of the 5′ and 3′ terminal dinucleotides are not linked by non-negatively charged internucleotidic linkages, i.e., the guide strand comprises one more non-negatively charged internucleotidic linkages downstream, i.e., in the 3′ direction, relative to the linkage between the 5′ terminal dinucleotide and/or upstream, i.e., in the 5′ direction, relative to the linkage between the 3′ terminal dinucleotide;
[0077] (2) a guide strand where one or more Rp, Sp, or stereorandom non-negatively charged internucleotidic linkage occurs between any two adjacent nucleotides between the second (+2) nucleotide relative to the 5′ terminal nucleotide of the guide strand and the penultimate 3′ (N-1) nucleotide of the guide strand, where N is the 3′ terminal nucleotide;
[0078] (3) a guide strand where an Rp, Sp, or stereorandom non-negatively charged internucleotidic linkage occurs between the third (+3) and fourth (+4) nucleotides, relative to the 5′ terminal nucleotide, of the guide strand and/or between the tenth (+10) and eleventh (+11) nucleotides, relative to the 5′ terminal nucleotide;
[0079] (4) a passenger strand where one or more Rp, Sp, or stereorandom non-negatively charged internucleotidic linkage occurs upstream, i.e., in the 5′ direction, relative to the central nucleotide of the passenger strand; and
[0080] (5) Passenger strand where one or more Rp, Sp, or stereorandom non-negatively charged internucleotidic linkage occurs downstream, i.e., in the 3′ direction, relative to the central nucleotide of the passenger strand, and
   wherein the ds oligonucleotide further comprises a 2′ modification, e.g., a 2′ F modification, of the 3′ nucleotide of a nucleotide pair linked by an Rp, Sp, or stereorandom non-negatively charged internucleotidic linkage, and the passenger strand comprises one or more backbone phosphorothioate chiral centers in Rp or Sp configuration. In certain embodiments, the one or more Rp, Sp, or stereorandom non-negatively charged internucleotidic linkage incorporated into the guide or passenger strand is an Rp non-negatively charged internucleotidic linkage. In certain embodiments, the one or more Rp, Sp, or stereorandom non-negatively charged internucleotidic linkage is an Sp non-negatively charged internucleotidic linkage. In certain embodiments, the one or more Rp, Sp, or stereorandom non-negatively charged internucleotidic linkage is a stereorandom non-negatively charged internucleotidic linkage.

[0081] In certain embodiments, the guide strand comprises backbone phosphorothioate chiral centers in Rp, Sp, or alternating configurations between the 5′ terminal (+1) nucleotide and the immediately downstream (+2) nucleotide and between the +2 nucleotide and the immediately downstream (+3) nucleotide, and one or more of:
[0082] (1) a guide strand where one or both of the 5′ and 3′ terminal dinucleotides are not linked by non-negatively charged internucleotidic linkages, i.e., the guide strand comprises one more non-negatively charged internucleotidic linkages downstream, i.e., in the 3′ direction, relative to the linkage between the 5′ terminal dinucleotide and/or upstream, i.e., in the 5′ direction, relative to the linkage between the 3′ terminal dinucleotide;
[0083] (2) a guide strand where one or more Rp, Sp, or stereorandom non-negatively charged internucleotidic linkage occurs between any two adjacent nucleotides between the second (+2) nucleotide relative to the 5′ terminal nucleotide of the guide strand and the penultimate 3′ (N-1) nucleotide of the guide strand, where N is the 3′ terminal nucleotide;
[0084] (3) a guide strand where an Rp, Sp, or stereorandom non-negatively charged internucleotidic linkage occurs between the third (+3) and fourth (+4) nucleotides, relative to the 5′ terminal nucleotide, of the guide strand and/or between the tenth (+10) and eleventh (+11) nucleotides, relative to the 5′ terminal nucleotide;
[0085] (4) a passenger strand where one or more Rp, Sp, or stereorandom non-negatively charged internucleotidic linkage occurs upstream, i.e., in the 5′ direction, relative to the central nucleotide of the passenger strand; and
[0086] (5) Passenger strand where one or more Rp, Sp, or stereorandom non-negatively charged internucleotidic linkage occurs downstream, i.e., in the 3′ direction, relative to the central nucleotide of the passenger strand, and
   wherein the ds oligonucleotide further comprises a 2′ modification, e.g., a 2′ F modification, of the 3′ nucleotide of a nucleotide pair linked by an Rp, Sp, or stereorandom non-negatively charged internucleotidic linkage, and the passenger strand comprises one or more backbone chiral centers in Rp or Sp configuration. In certain embodiments, the one or more Rp, Sp, or stereorandom non-negatively charged internucleotidic linkage incorporated into the guide or passenger strand is an Rp non-negatively charged internucleotidic linkage. In certain embodiments, the one or more Rp, Sp, or stereorandom non-negatively charged internucleotidic linkage is an Sp non-negatively charged internucleotidic linkage. In certain embodiments, the one or more Rp, Sp, or stereorandom non-negatively charged internucleotidic linkage is a stereorandom non-negatively charged internucleotidic linkage.

[0087] In certain embodiments, the guide strand comprises one or more backbone phosphorothioate chiral centers in Rp or Sp configuration upstream of backbone chiral centers in Sp configuration between the 3′ terminal nucleotide and the penultimate (N-1) nucleotide and as between the penultimate (N-1) nucleotide and the immediately upstream (N-2) nucleotide, and one or more of:
[0088] (1) a guide strand where one or both of the 5′ and 3′ terminal dinucleotides are not linked by non-negatively charged internucleotidic linkages, i.e., the guide strand comprises one more non-negatively charged internucleotidic linkages downstream, i.e., in the 3′ direction, relative to the linkage between the 5′ terminal dinucleotide and/or upstream, i.e., in the 5′ direction, relative to the linkage between the 3′ terminal dinucleotide;
[0089] (2) a guide strand where one or more Rp, Sp, or stereorandom non-negatively charged internucleotidic linkage occurs between any two adjacent nucleotides between the second (+2) nucleotide relative to the 5′ terminal nucleotide of the guide strand and the penultimate 3′ (N-1) nucleotide of the guide strand, where N is the 3′ terminal nucleotide;
[0090] (3) a guide strand where an Rp, Sp, or stereorandom non-negatively charged internucleotidic linkage occurs between the third (+3) and fourth (+4) nucleotides, relative to the 5′ terminal nucleotide, of the guide strand and/or between the tenth (+10) and eleventh (+11) nucleotides, relative to the 5′ terminal nucleotide;
[0091] (4) a passenger strand where one or more Rp, Sp, or stereorandom non-negatively charged internucleotidic linkage occurs upstream, i.e., in the 5′ direction, relative to the central nucleotide of the passenger strand; and
[0092] (5) Passenger strand where one or more Rp, Sp, or stereorandom non-negatively charged internucleotidic linkage occurs downstream, i.e., in the 3′ direction, relative to the central nucleotide of the passenger strand, and
   wherein the ds oligonucleotide further comprises a 2′ modification, e.g., a 2′ F modification, of the 3′ nucleotide of a nucleotide pair linked by an Rp, Sp, or stereorandom non-negatively charged internucleotidic linkage, and the passenger strand comprises one or more backbone chiral centers in Rp or Sp configuration. In certain embodiments, the one or more Rp, Sp, or stereorandom non-negatively charged internucleotidic linkage incorporated into the guide or passenger strand is an Rp non-negatively charged internucleotidic linkage. In certain embodiments, the one or more Rp, Sp, or stereorandom non-negatively charged internucleotidic linkage is an Sp non-negatively charged internucleotidic linkage. In certain embodiments, the one or more Rp, Sp, or stereorandom non-negatively charged internucleotidic linkage is a stereorandom non-negatively charged internucleotidic linkage.

[0093] In certain embodiments, the guide strand comprises one or more backbone phosphorothioate chiral centers in Rp or Sp configuration between the 5′ terminal (+1) nucleotide and the immediately downstream (+2) nucleotide and between the (+2) nucleotide and the immediately downstream (+3) nucleotide, as well as between one or both of: (a) the (+3) nucleotide and the (+4) nucleotide; and (b) the (+5) nucleotide and the (+6) nucleotide, and one or more of:
[0094] (1) a guide strand where one or both of the 5′ and 3′ terminal dinucleotides are not linked by non-negatively charged internucleotidic linkages, i.e., the guide strand comprises one more non-negatively charged internucleotidic linkages downstream, i.e., in the 3′ direction, relative to the linkage between the 5′ terminal dinucleotide and/or upstream, i.e., in the 5′ direction, relative to the linkage between the 3′ terminal dinucleotide;
[0095] (2) a guide strand where one or more Rp, Sp, or stereorandom non-negatively charged internucleotidic linkage occurs between any two adjacent nucleotides between the second (+2) nucleotide relative to the 5′ terminal nucleotide of the guide strand and the penultimate 3′ (N-1) nucleotide of the guide strand, where N is the 3′ terminal nucleotide;
[0096] (3) a guide strand where an Rp, Sp, or stereorandom non-negatively charged internucleotidic linkage occurs between the third (+3) and fourth (+4) nucleotides, relative to the 5′ terminal nucleotide, of the guide strand and/or between the tenth (+10) and eleventh (+11) nucleotides, relative to the 5′ terminal nucleotide;
[0097] (4) a passenger strand where one or more Rp, Sp, or stereorandom non-negatively charged internucleotidic linkage occurs upstream, i.e., in the 5′ direction, relative to the central nucleotide of the passenger strand; and
[0098] (5) Passenger strand where one or more Rp, Sp, or stereorandom non-negatively charged internucleotidic linkage occurs downstream, i.e., in the 3′ direction, relative to the central nucleotide of the passenger strand, and
   wherein the ds oligonucleotide further comprises a 2′ modification, e.g., a 2′ F modification, of the 3′ nucleotide of a nucleotide pair linked by an Rp, Sp, or stereorandom non-negatively charged internucleotidic linkage, and the passenger strand comprises one or more backbone chiral centers in Rp or Sp configuration. In certain embodiments, the one or more Rp, Sp, or stereorandom non-negatively charged internucleotidic linkage incorporated into the guide or passenger strand is an Rp non-negatively charged internucleotidic linkage. In certain embodiments, the one or more Rp, Sp, or stereorandom non-negatively charged internucleotidic linkage is an Sp non-negatively charged internucleotidic linkage. In certain embodiments, the one or more Rp, Sp, or stereorandom non-negatively charged internucleotidic linkage is a stereorandom non-negatively charged internucleotidic linkage.

[0099] In certain embodiments, the guide strand comprises one or more Rp, Sp, or stereorandom non-negatively charged internucleotidic linkage occurs between any two adjacent nucleotides between the second (+2) nucleotide relative to the 5′ terminal nucleotide of the guide strand and the penultimate 3′ (N-1) nucleotide of the guide strand, where N is the 3′ terminal nucleotide, a 2′ modification, e.g., a 2′ F modification, of the 3′ nucleotide of a nucleotide pair linked by an Rp, Sp, or stereorandom non-negatively charged internucleotidic linkage, and the passenger strand comprises one or more backbone chiral centers in Rp or Sp configuration. In certain embodiments, the one or more Rp, Sp, or stereorandom non-negatively charged internucleotidic linkage incorporated into the guide strand is an Rp non-negatively charged internucleotidic linkage. In certain embodiments, the one or more Rp, Sp, or stereorandom non-negatively charged internucleotidic linkage is an Sp non-negatively charged internucleotidic linkage. In certain embodiments, the one or more Rp, Sp, or stereorandom non-negatively charged internucleotidic linkage is a stereorandom non-negatively charged internucleotidic linkage.

[0100] In certain embodiments, the guide strand comprises backbone phosphorothioate chiral centers in Sp configuration between the 3′ terminal nucleotide and the penultimate (N-1) nucleotide and as between the penultimate (N-1) nucleotide and the immediately upstream (N-2) nucleotide, a 2′ modification, e.g., a 2′ F modification, of the 3′ nucleotide of a nucleotide pair linked by an Rp, Sp, or stereorandom non-negatively charged internucleotidic linkage, and the passenger strand comprises 0-n Rp, Sp, or stereorandom non-negatively charged internucleotidic linkages, where n is about 1 to 49 and one or more backbone chiral centers in Rp or Sp configuration. In certain embodiments, the one or more Rp, Sp, or stereorandom non-negatively charged internucleotidic linkage incorporated into the guide strand is an Rp non-negatively charged internucleotidic linkage. In certain embodiments, the one or more Rp, Sp, or stereorandom non-negatively charged internucleotidic linkage is an Sp non-negatively charged internucleotidic linkage. In certain embodiments, the one or more Rp, Sp, or stereorandom non-negatively charged internucleotidic linkage is a stereorandom non-negatively charged internucleotidic linkage.

[0101] In certain embodiments, the guide strand comprises backbone phosphorothioate chiral centers in Rp, Sp, or alternating configurations between the 5′ terminal (+1) nucleotide and the immediately downstream (+2) nucleotide and between the +2 nucleotide and the immediately downstream (+3) nucleotide, a 2′ modification, e.g., a 2′ F modification, of the 3′ nucleotide of a nucleotide pair linked by an Rp, Sp, or stereorandom non-negatively charged internucleotidic linkage, and the passenger strand comprises 0-n Rp, Sp, or stereorandom non-negatively charged internucleotidic linkages, where n is about 1 to 49 and one or more backbone chiral centers in Rp or Sp configuration. In certain embodiments, the one or more Rp, Sp, or stereorandom non-negatively charged internucleotidic linkage incorporated into the guide strand is an Rp non-negatively charged internucleotidic linkage. In certain embodiments, the one or more Rp, Sp, or stereorandom non-negatively charged internucleotidic linkage is an Sp non-negatively charged internucleotidic linkage. In certain embodiments, the one or more Rp, Sp, or stereorandom non-negatively charged internucleotidic linkage is a stereorandom non-negatively charged internucleotidic linkage.

[0102] In certain embodiments, the guide strand comprises one or more backbone phosphorothioate chiral centers in Rp or Sp configuration upstream of backbone phosphorothioate chiral centers in Sp configuration between the 3′ terminal nucleotide and the penultimate (N-1) nucleotide and as between the penultimate (N-1) nucleotide and the immediately upstream (N-2) nucleotide, a 2′ modification, e.g., a 2′ F modification, of the 3′ nucleotide of a nucleotide pair linked by an Rp, Sp, or stereorandom non-negatively charged internucleotidic linkage, and the passenger strand comprises 0-n Rp, Sp, or stereorandom non-negatively charged internucleotidic linkages, where n is about 1 to 49 and one or more backbone chiral centers in Rp or Sp configuration. In certain embodiments, the one or more Rp, Sp, or stereorandom non-negatively charged internucleotidic linkage incorporated into the guide strand is an Rp non-negatively charged internucleotidic linkage. In certain embodiments, the one or more Rp, Sp, or stereorandom non-negatively charged internucleotidic linkage is an Sp non-negatively charged internucleotidic linkage. In certain embodiments, the one or more Rp, Sp, or stereorandom non-negatively charged internucleotidic linkage is a stereorandom non-negatively charged internucleotidic linkage.

[0103] In certain embodiments, the guide strand comprises one or more Rp, Sp, or stereorandom non-negatively charged internucleotidic linkage occurs between any two adjacent nucleotides between the second (+2) nucleotide relative to the 5′ terminal nucleotide of the guide strand and the penultimate 3′ (N-1) nucleotide of the guide strand, where N is the 3′ terminal nucleotide, a 2′ modification, e.g., a 2′ F modification, of the 3′ nucleotide of a nucleotide pair linked by an Rp, Sp, or stereorandom non-negatively charged internucleotidic linkage, and the passenger strand comprises 0-n Rp, Sp, or stereorandom non-negatively charged internucleotidic linkages, where n is about 1 to 49 and one or more backbone chiral centers in Rp or Sp configuration. In certain embodiments, the one or more Rp, Sp, or stereorandom non-negatively charged internucleotidic linkage incorporated into the guide strand is an Rp non-negatively charged internucleotidic linkage. In certain embodiments, the one or more Rp, Sp, or stereorandom non-negatively charged internucleotidic linkage is an Sp non-negatively charged internucleotidic linkage. In certain embodiments, the one or more Rp, Sp, or stereorandom non-negatively charged internucleotidic linkage is a stereorandom non-negatively charged internucleotidic linkage.

[0104] In certain embodiments, provided ds oligonucleotides may participate in exon skipping mechanisms. In certain embodiments, provided ds oligonucleotides may be aptamers. In certain embodiments, provided ds oligonucleotides may bind to and inhibit the function of a protein, small molecule, nucleic acid or cell. In certain embodiments, provided ds oligonucleotides may participate in forming a triplex helix with a double-stranded nucleic acid in the cell. In certain embodiments, provided ds oligonucleotides may bind to genomic (e.g., chromosomal) nucleic acid. In certain embodiments, provided ds oligonucleotides may bind to genomic (e.g., chromosomal) nucleic acid, thus preventing or decreasing expression of the nucleic acid (e.g., by preventing or decreasing transcription, transcriptional enhancement, modification, etc.). In certain embodiments, provided ds oligonucleotides may bind to DNA quadruplexes. In certain embodiments, provided ds oligonucleotides may be immunomodulatory. In certain embodiments, provided ds oligonucleotides may be immunostimulatory. In certain embodiments, provided oligonucleotides may be immunostimulatory and may comprise a CpG sequence. In certain embodiments, provided ds oligonucleotides may be immunostimulatory and may comprise a CpG sequence and may be useful as an adjuvant. In certain embodiments, provided ds oligonucleotides may be immunostimulatory and may comprise a CpG sequence and may be useful as an adjuvant in treating a disease (e.g., an infectious disease or cancer). In certain embodiments, provided ds oligonucleotides may be therapeutic. In certain embodiments, provided ds oligonucleotides may be non-therapeutic. In certain embodiments, provided ds oligonucleotides may be therapeutic or non-therapeutic. In certain embodiments, provided ds oligonucleotides are useful in therapeutic, diagnostic, research and/or nanomaterials applications. In certain embodiments, provided ds oligonucleotides may be useful for experimental purposes. In certain embodiments, provided ds oligonucleotides may be useful for experimental purposes, e.g., as a probe, in a microarray, etc. In certain embodiments, provided ds oligonucleotides may participate in more than one biological mechanism; in certain such embodiments, for example, provided ds oligonucleotides may participate in both RNAi and RNase H mechanisms.

[0105] In certain embodiments, provided ds oligonucleotides are directed to an HSD17B13 target (e.g., an HSD17B13 target sequence, an HSD17B13 target RNA, an HSD17B13 target mRNA, an HSD17B13 target pre-mRNA, an HSD17B13 target gene, etc.). An HSD17B13 target gene is a gene with respect to which expression and/or activity of one or more HSD17B13 gene products (e.g., HSD17B13 RNA and/or protein products) are intended to be altered. In certain embodiments, an HSD17B13 target gene is intended to be inhibited. Thus, when a ds oligonucleotide as described herein acts on an HSD17B13 target gene, presence and/or activity of one or more HSD17B13 gene products are altered when the ds oligonucleotide is present as compared with when it is absent.

[0106] In certain embodiments, an HSD17B13 target is a specific HSD17B13 allele with respect to which expression and/or activity of one or more products (e.g., HSD17B13 RNA and/or protein products) are intended to be altered. In certain embodiments, an HSD17B13 target allele is one whose presence and/or expression is associated (e.g., correlated) with presence, incidence, and/or severity, of one or more HSD17B13 associated diseases and/or conditions. Alternatively or additionally, in certain embodiments, an HSD17B13 target allele is one for which alteration of level and/or activity of one or more HSD17B13 gene products correlates with improvement (e.g., delay of onset, reduction of severity, responsiveness to other therapy, etc) in one or more aspects of an HSD17B13 associated disease and/or condition.

[0107] In certain embodiments, e.g., where presence and/or activity of a particular HSD17B13 allele (an HSD17B13 disease-associated allele) is associated (e.g., correlated) with presence, incidence and/or severity of one or more disorders, diseases and/or conditions, a different HSD17B13 allele exists and is not so associated, or is associated to a lesser extent (e.g., shows less significant, or statistically insignificant correlation), ds oligonucleotides and methods thereof as described herein may preferentially or specifically target the associated allele relative to the one or more less-associated/unassociated allele(s), thus mediating allele-specific suppression.

[0108] In certain embodiments, an HSD17B13 target sequence is an HSD17B13 sequence to which an oligonucleotide as described herein binds. In certain embodiments, an HSD17B13 target sequence is identical to, or is an exact complement of, an HSD17B13 sequence of a provided oligonucleotide, or of consecutive residues therein (e.g., a provided oligonucleotide includes an HSD17B13 target-binding sequence that is identical to, or an exact complement of, an HSD17B13 target sequence). In certain embodiments, an HSD17B13 target-binding sequence is an exact complement of an HSD17B13 target sequence of an HSD17B13 transcript (e.g., pre-mRNA, mRNA, etc.). An HSD17B13 target-binding sequence/target sequence can be of various lengths to provided oligonucleotides with desired activities and/or properties. In certain embodiments, an HSD17B13 target binding sequence/target sequence comprises 5-50 (e.g., 10-40, 15-30, 15-25, 16-25, 17-25, 18-25, 19-25, 20-25, 10, 11, 12, 13, 14, 15, 16, 17, 18, 19, 20, 21, 22, 23, 24, 25, or more) bases. In certain embodiments, a small number of differences/mismatches is tolerated between (a relevant portion of) an oligonucleotide and its target sequence, including but not limited to the 5′ and/or 3′-end regions of the HSD17B13 target and/or oligonucleotide sequence. In certain embodiments, an HSD17B13 target sequence is present within an HSD17B13 target gene. In certain embodiments, an HSD17B13 target sequence is present within an HSD17B13 transcript (e.g., an mRNA and/or a pre-mRNA) produced from an HSD17B13 target gene.

[0109] In certain embodiments, an HSD17B13 target sequence includes one or more allelic sites (i.e., positions within an HSD17B13 target gene at which allelic variation occurs). In certain embodiments, an allelic site is a mutation. In certain embodiments, an allelic site is a SNP. In some such embodiments, a provided oligonucleotide binds to one allele preferentially or specifically relative to one or more other alleles. In certain embodiments, a provided oligonucleotide binds preferentially to a disease-associated allele. For example, in certain embodiments, an oligonucleotide (or a target-binding sequence portion thereof) provided herein has a sequence that is, fully or at least in part, identical to, or an exact complement of a particular allelic version of an HSD17B13 target sequence.

[0110] In certain embodiments, an oligonucleotide (or a target-binding sequence portion thereof) provided herein has a sequence that is identical to, or an exact complement of an HSD17B13 target sequence comprising an allelic site, or an allelic site, of a disease-associated allele. In certain embodiments, an oligonucleotide provided herein has an HSD17B13 target binding sequence that is an exact complement of an HSD17B13 target sequence comprising an allelic site of an HSD17B13 transcript of an allele (in certain embodiments, a disease-associated allele), wherein the allelic site is a mutation. In certain embodiments, an oligonucleotide provided herein has an HSD17B13 target binding sequence that is an exact complement of an HSD17B13 target sequence comprising an allelic site of an HSD17B13 transcript of an allele (in certain embodiments, a disease-associated allele), wherein the allelic site is a SNP. In certain embodiments, a sequence is any sequence disclosed herein.

[0111] Unless otherwise noted, all sequences (including, but not limited to base sequences and patterns of chemistry, modification, and/or stereochemistry) are presented in 5′ to 3′ order, with the 5′ terminal nucleotide identified as the “+1” position and the 3′ terminal nucleotide identified either by the number of nucleotides of the full sequence or by “N”, with the penultimate nucleotide identified, e.g., as “N-1”, and so on.

[0112] In certain embodiments, the present disclosure provides compositions and methods related to an oligonucleotide which is specific to an HSD17B13 target and which has any format, structural element or base sequence of any oligonucleotide disclosed herein.

[0113] In certain embodiments, the present disclosure provides compositions and methods related to an oligonucleotide which is specific to an HSD17B13 target and which has or comprises the base sequence of any oligonucleotide disclosed herein, or a region of at least 15 contiguous nucleotides of the base sequence of any oligonucleotide disclosed herein, wherein the first nucleotide of the base sequence or the first nucleotide of the at least 15 contiguous nucleotides can be optionally replaced by T or DNA T.

[0114] In certain embodiments, the present disclosure provides compositions and methods for RNA interference directed by a RNAi agent (also referred to as a RNAi oligonucleotides). In certain embodiments, oligonucleotides of such compositions can have a format, structural element or base sequence of an oligonucleotide disclosed herein.

[0115] In certain embodiments, the present disclosure provides compositions and methods for RNase H-mediated knockdown of an HSD17B13 target gene RNA directed by an oligonucleotide (e.g., an antisense oligonucleotide).

[0116] Provided oligonucleotides and oligonucleotide compositions can have any format, structural element or base sequence of any oligonucleotide disclosed herein. In certain embodiments, a structural element is a 5′-end structure, 5′-end region, 5′-nucleotide, seed region, post-seed region, 3′-end region, 3′-terminal dinucleotide, 3′-end cap, or any portion of any of these structures, GC content, long GC stretch, and/or any modification, chemistry, stereochemistry, pattern of modification, chemistry or stereochemistry, or a chemical moiety (e.g., including but not limited to, a targeting moiety, a lipid moiety, a GalNAc moiety, a carbohydrate moiety, etc.), any component, or any combination of any of the above.

[0117] In certain embodiments, the present disclosure provides compositions and methods of use of an oligonucleotide.

[0118] In certain embodiments, the present disclosure provides compositions and methods of use of an oligonucleotide which can direct both RNA interference and RNase H-mediated knockdown of an HSD17B13 target gene RNA. In certain embodiments, oligonucleotides of such compositions can have a format, structural element or base sequence of an oligonucleotide disclosed herein.

[0119] In certain embodiments, an oligonucleotide directing a particular event or activity participates in the particular event or activity, e.g., a decrease in the expression, level or activity of a target gene or a gene product thereof. In certain embodiments, an oligonucleotide is deemed to “direct” a particular event or activity when presence of the oligonucleotide in a system in which the event or activity can occur correlates with increased detectable incidence, frequency, intensity and/or level of the event or activity.

[0120] In certain embodiments, a provided oligonucleotide comprises any one or more structural elements of an oligonucleotide as described herein, e.g., a base sequence (or a portion thereof of at least 15 contiguous bases); a pattern of internucleotidic linkages (or a portion thereof of at least 5 contiguous internucleotidic linkage); a pattern of stereochemistry of internucleotidic linkages (or a portion thereof of at least 5 contiguous internucleotidic linkages); a 5′-end structure; a 5′-end region; a first region; a second region; and a 3′-end region (which can be a 3′-terminal dinucleotide and/or a 3′-end cap); and an optional additional chemical moiety; and, in certain embodiments, at least one structural element comprises a chirally controlled chiral center. In certain embodiments, a 3′-terminal dinucleotide can comprise two total nucleotides. In certain embodiments, an oligonucleotide further comprises a chemical moiety selected from, as non-limiting examples, a targeting moiety, a carbohydrate moiety, a GalNAc moiety, a lipid moiety, and any other chemical moiety described herein or known in the art. In certain embodiments, a moiety that binds APGR is a moiety of GalNAc, or a variant, derivative or modified version thereof, as described herein and/or known in the art. In certain embodiments, an oligonucleotide is a RNAi agent. In certain embodiments, a first region is a seed region. In certain embodiments, a second region is a post-seed region.

[0121] In certain embodiments, a provided oligonucleotide comprises any one or more structural elements of a RNAi agent as described herein, e.g., a 5′-end structure; a 5′-end region; a seed region; a post-seed region (the region between the seed region and the 3′-end region); and a 3′-end region (which can be a 3′-terminal dinucleotide and/or a 3′-end cap); and an optional additional chemical moiety; and, in certain embodiments, at least one structural element comprises a chirally controlled chiral center. In certain embodiments, a 3′-terminal dinucleotide can comprise two total nucleotides. In certain embodiments, an oligonucleotide further comprises a chemical moiety selected from, as non-limiting examples, a targeting moiety, a carbohydrate moiety, a GalNAc moiety, and a lipid moiety. In certain embodiments, a moiety that binds APGR is any GalNAc, or variant, derivative or modification thereof, as described herein or known in the art.

[0122] In certain embodiments, a provided oligonucleotide comprises any one or more structural elements of an oligonucleotide as described herein, e.g., a 5′-end structure, a 5′-end region, a first region, a second region, a 3′-end region, and an optional additional chemical moiety, wherein at least one structural element comprises a chirally controlled chiral center. In certain embodiments, the oligonucleotide comprises a span of at least 5 total nucleotides without 2′-modifications. In certain embodiments, the oligonucleotide further comprises an additional chemical moiety selected from, as non-limiting examples, a targeting moiety, a carbohydrate moiety, a GalNAc moiety, and a lipid moiety. In certain embodiments, a provided oligonucleotide is capable of directing RNA interference. In certain embodiments, a provided oligonucleotide is capable of directing RNase H-mediated knockdown. In certain embodiments, a provided oligonucleotide is capable of directing both RNA interference and RNase H-mediated knockdown. In certain embodiments, a first region is a seed region. In certain embodiments, a second region is a post-seed region.

[0123] In certain embodiments, a provided oligonucleotide comprises any one or more structural elements of a RNAi agent, e.g., a 5′-end structure, a 5′-end region, a seed region, a post-seed region, and a 3′-end region and an optional additional chemical moiety, wherein at least one structural element comprises a chirally controlled chiral center; and, in certain embodiments, the oligonucleotide is also capable of directing RNase H-mediated knockdown of a target gene RNA. In certain embodiments, the oligonucleotide comprises a span of at least 5 total 2′-deoxy nucleotides. In certain embodiments, the oligonucleotide further comprises a chemical moiety selected from, as non-limiting examples, a targeting moiety, a carbohydrate moiety, a GalNAc moiety, and a lipid moiety, and any other additional chemical moiety described herein.

[0124] In certain embodiments, the present disclosure demonstrates that oligonucleotide properties can be modulated through chemical modifications. In certain embodiments, the present disclosure provides an oligonucleotide composition comprising a first plurality of oligonucleotides which have a common base sequence and comprise one or more internucleotidic linkage, sugar, and/or base modifications. In certain embodiments, the present disclosure provides an oligonucleotide composition capable of directing RNA interference and comprising a first plurality of oligonucleotides which have a common base sequence and comprise one or more internucleotidic linkage, and/or one or more sugar, and/or one or more base modifications. In certain embodiments, an oligonucleotide or oligonucleotide composition is also capable of directing RNase H-mediated knockdown of an HSD17B13 target gene RNA. In certain embodiments, the present disclosure demonstrates that oligonucleotide properties, e.g., activities, toxicities, etc., can be modulated through chemical modifications of sugars, nucleobases, and/or internucleotidic linkages. In certain embodiments, the present disclosure provides an oligonucleotide composition comprising a plurality of oligonucleotides which have a common base sequence, and comprise one or more modified internucleotidic linkages (or “non-natural internucleotidic linkages”, linkages that can be utilized in place of a natural phosphate internucleotidic linkage (—OP(O)(OH)O—, which may exist as a salt form (—OP(O)(O⁻)O—) at a physiological pH) found in natural DNA and RNA), one or more modified sugar moieties, and/or one or more natural phosphate linkages. In certain embodiments, provided oligonucleotides may comprise two or more types of modified internucleotidic linkages. In certain embodiments, a provided oligonucleotide comprises a non-negatively charged internucleotidic linkage. In certain embodiments, a non-negatively charged internucleotidic linkage is a neutral internucleotidic linkage. In certain embodiments, a neutral internucleotidic linkage comprises a cyclic guanidine moiety. Such moieties an optionally substituted. In certain embodiments, a provided oligonucleotide comprises a neutral internucleotidic linkage and another internucleotidic linkage which is not a neutral backbone. In certain embodiments, a provided oligonucleotide comprises a neutral internucleotidic linkage and a phosphorothioate internucleotidic linkage. In certain embodiments, provided oligonucleotide compositions comprising a plurality of oligonucleotides are chirally controlled and level of the plurality of oligonucleotides in the composition is controlled or pre-determined, and oligonucleotides of the plurality share a common stereochemistry configuration at one or more chiral internucleotidic linkages. For example, in certain embodiments, oligonucleotides of a plurality share a common stereochemistry configuration at 1, 2, 3, 4, 5, 6, 7, 8, 9, 10, 11, 12, 13, 14, 15, 16, 17, 18, 19, 20, 21, 22, 23, 24, 25, 26, 27, 28, 29, 30, 35, 40, 45, 50 or more chiral internucleotidic linkages, each of which is independently Rp or Sp; in certain embodiments, oligonucleotides of a plurality share a common stereochemistry configuration at each chiral internucleotidic linkages. In certain embodiments, a chiral internucleotidic linkage where a controlled level of oligonucleotides of a composition share a common stereochemistry configuration (independently in the Rp or Sp configuration) is referred to as a chirally controlled internucleotidic linkage. In certain embodiments, a modified internucleotidic linkage is a non-negatively charged (neutral or cationic) internucleotidic linkage in that at a pH, (e.g., human physiological pH (˜7.4), pH of a delivery site (e.g., an organelle, cell, tissue, organ, organism, etc.), etc.), it largely (e.g., at least 5%, 10%, 20%, 30%, 40%, 50%, 60%, 70%, 80%, 90%, etc.; in certain embodiments, at least 30%; in certain embodiments, at least 40%; in certain embodiments, at least 50%; in certain embodiments, at least 60%; in certain embodiments, at least 70%; in certain embodiments, at least 80%; in certain embodiments, at least 90%; in certain embodiments, at least 99%; etc.) exists as a neutral or cationic form (as compared to an anionic form (e.g., —O—P(O)(O⁻)—O— (the anionic form of natural phosphate linkage), —O—P(O)(S⁻)—O— (the anionic form of phosphorothioate linkage), etc.)), respectively. In certain embodiments, a modified internucleotidic linkage is a neutral internucleotidic linkage in that at a pH, it largely exists as a neutral form. In certain embodiments, a modified internucleotidic linkage is a cationic internucleotidic linkage in that at a pH, it largely exists as a cationic form. In certain embodiments, a pH is human physiological pH (˜7.4). In certain embodiments, a modified internucleotidic linkage is a neutral internucleotidic linkage in that at pH 7.4 in a water solution, at least 90% of the internucleotidic linkage exists as its neutral form. In certain embodiments, a modified internucleotidic linkage is a neutral internucleotidic linkage in that in a water solution of the oligonucleotide, at least 50%, 60%, 70%, 80%, 90%, 95%, or 99% of the internucleotidic linkage exists in its neutral form. In certain embodiments, the percentage is at least 90%. In certain embodiments, the percentage is at least 95%. In certain embodiments, the percentage is at least 99%. In certain embodiments, a non-negatively charged internucleotidic linkage, e.g., a neutral internucleotidic linkage, when in its neutral form has no moiety with a pKa that is less than 8, 9, 10, 11. 12, 13, or 14. In certain embodiments, pKa of an internucleotidic linkage in the present disclosure can be represented by pKa of CH₃— the internucleotidic linkage —CH₃ (i.e., replacing the two nucleoside units connected by the internucleotidic linkage with two —CH₃ groups). Without wishing to be bound by any particular theory, in at least some cases, a neutral internucleotidic linkage in an oligonucleotide can provide improved properties and/or activities, e.g., improved delivery, improved resistance to exonucleases and endonucleases, improved cellular uptake, improved endosomal escape and/or improved nuclear uptake, etc., compared to a comparable nucleic acid which does not comprises a neutral internucleotidic linkage.

[0125] In certain embodiments, a non-negatively charged internucleotidic linkage has the structure of e.g., of formula I-n-1, I-n-2, I-n-3, II, II-a-1, II-a-2, H-b-1, II-b-2, II-c-1, II-c-2, II-d-1, II-d-2, as described in U.S. Pat. Nos. 9,394,333, 9,744,183, 9,605,019, 9,598,458, 9,982,257, U.S. Ser. No. 10/160,969, U.S. Ser. No. 10/479,995, US 2020/0056173, US 2018/0216107, US 2019/0127733, U.S. Ser. No. 10/450,568, US 2019/0077817, US 2019/0249173, US 2019/0375774, WO 2018/223056, WO 2018/223073, WO 2018/223081, WO 2018/237194, WO 2019/032607, WO 2019/055951, WO 2019/075357, WO 2019/200185, WO 2019/217784, and/or WO 2019/032612 etc. In certain embodiments, a non-negatively charged internucleotidic linkage comprises a cyclic guanidine moiety. In certain embodiments, a modified internucleotidic linkage comprising a cyclic guanidine moiety has the structure of:

[chemical structure]

In certain embodiments, a neutral internucleotidic linkage comprising a cyclic guanidine moiety is chirally controlled. In certain embodiments, the present disclosure pertains to a composition comprising an oligonucleotide comprising at least one neutral internucleotidic linkage and at least one phosphorothioate internucleotidic linkage.

[0126] In certain embodiments, the present disclosure pertains to a composition comprising an oligonucleotide comprising at least one neutral internucleotidic linkage and at least one phosphorothioate internucleotidic linkage, wherein the phosphorothioate internucleotidic linkage is a chirally controlled internucleotidic linkage in the Sp configuration.

[0127] In certain embodiments, the present disclosure pertains to a composition comprising an oligonucleotide comprising at least one neutral internucleotidic linkage and at least one phosphorothioate internucleotidic linkage, wherein the phosphorothioate is a chirally controlled internucleotidic linkage in the Rp configuration.

[0128] In certain embodiments, the present disclosure pertains to a composition comprising an oligonucleotide comprising at least one neutral internucleotidic linkage of a neutral internucleotidic linkage comprising a Tmg group

[chemical structure]

and at least one phosphorothioate.

[0129] In certain embodiments, each internucleotidic linkage in an oligonucleotide is independently selected from a natural phosphate linkage, a phosphorothioate linkage, and a non-negatively charged internucleotidic linkage (e.g., n001, n003, n004, n006, n008, n009, n013, n020, n021, n025, n026, n029, n031, n037, n046, n047, n048, n054, or n055). In some embodiments, each internucleotidic linkage in an oligonucleotide is independently selected from a natural phosphate linkage, a phosphorothioate linkage, and a neutral internucleotidic linkage (e.g., n001, n003, n004, n006, n008, n009, n013 n020, n021, n025, n026, n029, n031, n037, n046, n047, n048, n054, or n055).

[0130] In certain embodiments, the present disclosure pertains to a composition comprising an oligonucleotide comprising at least one neutral internucleotidic linkage of a neutral internucleotidic linkage comprising a Tmg group, and at least one phosphorothioate, wherein the phosphorothioate is a chirally controlled internucleotidic linkage in the Sp configuration.

[0131] In certain embodiments, the present disclosure pertains to a composition comprising an oligonucleotide comprising at least one neutral internucleotidic linkage selected from a neutral internucleotidic linkage of a neutral internucleotidic linkage comprising a Tmg group, and at least one phosphorothioate, wherein the phosphorothioate is a chirally controlled internucleotidic linkage in the Rp configuration.

[0132] Various types of internucleotidic linkages differ in properties. Without wishing to be bound by any theory, the present disclosure notes that a natural phosphate linkage (phosphodiester internucleotidic linkage) is anionic and may be unstable when used by itself without other chemical modifications in vivo; a phosphorothioate internucleotidic linkage is anionic, generally more stable in vivo than a natural phosphate linkage, and generally more hydrophobic; a neutral internucleotidic linkage such as one exemplified in the present disclosure comprising a cyclic guanidine moiety is neutral at physiological pH, can be more stable in vivo than a natural phosphate linkage, and more hydrophobic.

[0133] In certain embodiments, a chirally controlled neutral internucleotidic linkage sis neutral at physiological pH, chirally controlled, stable in vivo, hydrophobic, and may increase endosomal escape.

[0134] In certain embodiments, provided oligonucleotides comprise one or more regions, e.g., a block, wing, core, 5′-end, 3′-end, middle, seed, post-seed region, etc. In certain embodiments, a region (e.g., a block, wing, core, 5′-end, 3′-end, middle region, etc.) comprises a non-negatively charged internucleotidic linkage, e.g., of formula I-n-1, I-n-2, I-n-3, II, II-a-1, II-a-2, II-b-1, II-b-2, II-c-1, II-c-2, II-d-1, II-d-2, etc as described in U.S. Pat. Nos. 9,394,333, 9,744,183, 9,605,019, 9,598,458, 9,982,257, U.S. Ser. No. 10/160,969, U.S. Ser. No. 10/479,995, US 2020/0056173, US 2018/0216107, US 2019/0127733, U.S. Ser. No. 10/450,568, US 2019/0077817, US 2019/0249173, US 2019/0375774, WO 2018/223056, WO 2018/223073, WO 2018/223081, WO 2018/237194, WO 2019/032607, WO 2019/055951, WO 2019/075357, WO 2019/200185, WO 2019/217784, and/or WO 2019/032612. In certain embodiments, a region comprises a neutral internucleotidic linkage. In certain embodiments, a region comprises an internucleotidic linkage which comprises a cyclic guanidine guanidine. In certain embodiments, a region comprises an internucleotidic linkage which comprises a cyclic guanidine moiety. In certain embodiments, a region comprises an internucleotidic linkage having the structure of

[chemical structure]

In certain embodiments, such internucleotidic linkages are chirally controlled.

[0135] In certain embodiments, a nucleotide is a natural nucleotide. In certain embodiments, a nucleotide is a modified nucleotide. In certain embodiments, a nucleotide is a nucleotide analog. In certain embodiments, a base is a modified base. In certain embodiments, a base is protected nucleobase, such as a protected nucleobase used in oligonucleotide synthesis. In certain embodiments, a base is a base analog. In certain embodiments, a sugar is a modified sugar. In certain embodiments, a sugar is a sugar analog. In certain embodiments, an internucleotidic linkage is a modified internucleotidic linkage. In certain embodiments, a nucleotide comprises a base, a sugar, and an internucleotidic linkage, wherein each of the base, the sugar, and the internucleotidic linkage is independently and optionally naturally-occurring or non-naturally occurring. In certain embodiments, a nucleoside comprises a base and a sugar, wherein each of the base and the sugar is independently and optionally naturally-occurring or non-naturally occurring. Non-limiting examples of nucleotides include DNA (2′-deoxy) and RNA (2′-OH) nucleotides; and those which comprise one or more modifications at the base, sugar and/or internucleotidic linkage. Non-limiting examples of sugars include ribose and deoxyribose; and ribose and deoxyribose with 2′-modifications, including but not limited to 2′-F, LNA, 2′-OMe, and 2′-MOE modifications. In certain embodiments, an internucleotidic linkage is a moiety which does not a comprise a phosphorus but serves to link two natural or non-natural sugars.

[0136] In certain embodiments, a composition comprises a multimer of two or more of any: oligonucleotides of a first plurality and/or oligonucleotides of a second plurality, wherein the oligonucleotides of the first and second plurality can independently direct knockdown of the same or different targets independently via RNA interference and/or RNase H-mediated knockdown.

[0137] In certain embodiments, the present disclosure provides an oligonucleotide composition comprising a first plurality of oligonucleotides which share:
[0138] 1) a common base sequence;
[0139] 2) a common pattern of backbone linkages;
[0140] 3) common stereochemistry independently at at least 1, 2, 3, 4, 5, 6, 7, 8, 9, 10, 11, 12, 13, 14, 15, 16, 17, 18, 19, 20, 21, 22, 23, 24, 25, 26, 27, 28, 29, 30, 35, 40, 45, or 50 chiral internucleotidic linkages (“chirally controlled internucleotidic linkages”); which composition is chirally controlled in that level of the first plurality of oligonucleotides in the composition is predetermined.

[0141] In certain embodiments, an oligonucleotide composition comprising a plurality of oligonucleotides (e.g., a first plurality of oligonucleotides) is chirally controlled in that oligonucleotides of the plurality share a common stereochemistry independently at one or more chiral internucleotidic linkages. In certain embodiments, oligonucleotides of the plurality share a common stereochemistry configuration at 1, 2, 3, 4, 5, 6, 7, 8, 9, 10, 11, 12, 13, 14, 15, 16, 17, 18, 19, 20, 21, 22, 23, 24, 25, 26, 27, 28, 29, 30, 35, 40, 45, 50 or more chiral internucleotidic linkages, each of which is independently Rp or Sp In certain embodiments, oligonucleotides of the plurality share a common stereochemistry configuration at each chiral internucleotidic linkages. In certain embodiments, a chiral internucleotidic linkage where a predetermined level of oligonucleotides of a composition share a common stereochemistry configuration (independently Rp or Sp) is referred to as a chirally controlled internucleotidic linkage.

[0142] In certain embodiments, a predetermined level of oligonucleotides of a provided composition, e.g., a first plurality of oligonucleotides of certain example compositions, comprise 1, 2, 3, 4, 5, 6, 7, 8, 9, 10, 11, 12, 13, 14, 15, 16, 17, 18, 19, 20, 21, 22, 23, 24, 25, 26, 27, 28, 29, 30, 35, 40, 45, 50 or more chirally controlled internucleotidic linkages.

[0143] In certain embodiments, at least 5 internucleotidic linkages are chirally controlled; in certain embodiments, at least 10 internucleotidic linkages are chirally controlled; in certain embodiments, at least 15 internucleotidic linkages are chirally controlled; in certain embodiments, each chiral internucleotidic linkage is chirally controlled.

[0144] In certain embodiments, 1%-100% of chiral internucleotidic linkages are chirally controlled. In certain embodiments, at least 5%, 10%, 15%, 20%, 25%, 30%, 35%, 40%, 45%, 50%, 55%, 60%, 65%, 70%, 75%, 80%, 85%, 90%, 91%, 92%, 93%, 94%, 95%, 96%, 97%, 98%, or 99% of chiral internucleotidic linkages are chirally controlled.

[0145] In certain embodiments, the present disclosure provides an oligonucleotide composition comprising a first plurality of oligonucleotides which share:
[0146] 1) a common base sequence;
[0147] 2) a common pattern of backbone linkages; and
[0148] 3) a common pattern of backbone chiral centers, which composition is a substantially pure preparation of oligonucleotide in that a predetermined level of the oligonucleotides in the composition have the common base sequence and length, the common pattern of backbone linkages, and the common pattern of backbone chiral centers. In certain embodiments, the common pattern of backbone chiral centers comprises at least one internucleotidic linkage comprising a chirally controlled chiral center. In certain embodiments, a predetermined level of oligonucleotides is at least 1%, 5%, 10%, 15%, 20%, 25%, 30%, 35%, 40%, 45%, 50%, 55%, 60%, 65%, 70%, 75%, 80%, 85%, 90%, 91%, 92%, 93%, 94%, 95%, 96%, 97%, 98%, or 99% of all oligonucleotides in a provided composition. In certain embodiments, a predetermined level of oligonucleotides is at least 1%, 5%, 10%, 15%, 20%, 25%, 30%, 35%, 40%, 45%, 50%, 55%, 60%, 65%, 70%, 75%, 80%, 85%, 90%, 91%, 92%, 93%, 94%, 95%, 96%, 97%, 98%, or 99% of all oligonucleotides in a provided composition that are of or comprise a common base sequence. In certain embodiments, all oligonucleotides in a provided composition that are of or comprise a common base sequence are at least 1%, 5%, 10%, 15%, 20%, 25%, 30%, 35%, 40%, 45%, 50%, 55%, 60%, 65%, 70%, 75%, 80%, 85%, 90%, 91%, 92%, 93%, 94%, 95%, 96%, 97%, 98%, or 99% of all oligonucleotides in the composition. In certain embodiments, a predetermined level of oligonucleotides is at least 1%, 5%, 10%, 15%, 20%, 25%, 30%, 35%, 40%, 45%, 50%, 55%, 60%, 65%, 70%, 75%, 80%, 85%, 90%, 91%, 92%, 93%, 94%, 95%, 96%, 97%, 98%, or 99% of all oligonucleotides in a provided composition that are of or comprise a common base sequence, base modification, sugar modification and/or modified internucleotidic linkage. In certain embodiments, all oligonucleotides in a provided composition that are of or comprise a common base sequence, base modification, sugar modification and/or modified internucleotidic linkage are at least 1%, 5%, 10%, 15%, 20%, 25%, 30%, 35%, 40%, 45%, 50%, 55%, 60%, 65%, 70%, 75%, 80%, 85%, 90%, 91%, 92%, 93%, 94%, 95%, 96%, 97%, 98%, or 99% of all oligonucleotides in the composition. In certain embodiments, a predetermined level of oligonucleotides is at least 1%, 5%, 10%, 15%, 20%, 25%, 30%, 35%, 40%, 45%, 50%, 55%, 60%, 65%, 70%, 75%, 80%, 85%, 90%, 91%, 92%, 93%, 94%, 95%, 96%, 97%, 98%, or 99% of all oligonucleotides in a provided composition that are of or comprise a common base sequence, pattern of base modification, pattern of sugar modification, and/or pattern of modified internucleotidic linkage. In certain embodiments, all oligonucleotides in a provided composition that are of or comprise a common base sequence, pattern of base modification, pattern of sugar modification, and/or pattern of modified internucleotidic linkage are at least 1%, 5%, 10%, 15%, 20%, 25%, 30%, 35%, 40%, 45%, 50%, 55%, 60%, 65%, 70%, 75%, 80%, 85%, 90%, 91%, 92%, 93%, 94%, 95%, 96%, 97%, 98%, or 99% of all oligonucleotides in the composition. In certain embodiments, a predetermined level of oligonucleotides is at least 1%, 5%, 10%, 15%, 20%, 25%, 30%, 35%, 40%, 45%, 50%, 55%, 60%, 65%, 70%, 75%, 80%, 85%, 90%, 91%, 92%, 93%, 94%, 95%, 96%, 97%, 98%, or 99% of all oligonucleotides in a provided composition that share a common base sequence, a common pattern of base modification, a common pattern of sugar modification, and/or a common pattern of modified internucleotidic linkages. In certain embodiments, all oligonucleotides in a provided composition that share a common base sequence, a common pattern of base modification, a common pattern of sugar modification, and/or a common pattern of modified internucleotidic linkages are at least 1%, 5%, 10%, 15%, 20%, 25%, 30%, 35%, 40%, 45%, 50%, 55%, 60%, 65%, 70%, 75%, 80%, 85%, 90%, 91%, 92%, 93%, 94%, 95%, 96%, 97%, 98%, or 99% of all oligonucleotides in the composition. In certain embodiments, a predetermined level is 1-100%. In certain embodiments, a predetermined level is at least 1%. In certain embodiments, a predetermined level is at least 5%. In certain embodiments, a predetermined level is at least 10%. In certain embodiments, a predetermined level is at least 20%. In certain embodiments, a predetermined level is at least 30%. In certain embodiments, a predetermined level is at least 40%. In certain embodiments, a predetermined level is at least 50%. In certain embodiments, a predetermined level is at least 60%. In certain embodiments, a predetermined level is at least 10%. In certain embodiments, a predetermined level is at least 70%. In certain embodiments, a predetermined level is at least 80%. In certain embodiments, a predetermined level is at least 90%. In certain embodiments, a predetermined level is at least 5*(1/2 g), wherein g is the number of chirally controlled internucleotidic linkages. In certain embodiments, a predetermined level is at least 10*(1/2 g), wherein g is the number of chirally controlled internucleotidic linkages. In certain embodiments, a predetermined level is at least 100*(1/2 g), wherein g is the number of chirally controlled internucleotidic linkages. In certain embodiments, a predetermined level is at least (0.80)g, wherein g is the number of chirally controlled internucleotidic linkages. In certain embodiments, a predetermined level is at least (0.80)g, wherein g is the number of chirally controlled internucleotidic linkages. In certain embodiments, a predetermined level is at least (0.80)g, wherein g is the number of chirally controlled internucleotidic linkages. In certain embodiments, a predetermined level is at least (0.85)g, wherein g is the number of chirally controlled internucleotidic linkages. In certain embodiments, a predetermined level is at least (0.90)g, wherein g is the number of chirally controlled internucleotidic linkages. In certain embodiments, a predetermined level is at least (0.95)g, wherein g is the number of chirally controlled internucleotidic linkages. In certain embodiments, a predetermined level is at least (0.96)g, wherein g is the number of chirally controlled internucleotidic linkages. In certain embodiments, a predetermined level is at least (0.97)g, wherein g is the number of chirally controlled internucleotidic linkages. In certain embodiments, a predetermined level is at least (0.98)g, wherein g is the number of chirally controlled internucleotidic linkages. In certain embodiments, a predetermined level is at least (0.99)g, wherein g is the number of chirally controlled internucleotidic linkages. In certain embodiments, to determine level of oligonucleotides having g chirally controlled internucleotidic linkages in a composition, product of diastereopurity of each of the g chirally controlled internucleotidic linkages: (diastereopurity of chirally controlled internucleotidic linkage 1)*(diastereopurity of chirally controlled internucleotidic linkage 2)* . . . *(diastereopurity of chirally controlled internucleotidic linkage g) is utilized as the level, wherein diastereopurity of each chirally controlled internucleotidic linkage is independently represented by diastereopurity of a dimer comprising the same internucleotidic linkage and nucleosides flanking the internucleotidic linkage and prepared under comparable methods as the oligonucleotides (e.g., comparable or preferably identical oligonucleotide preparation cycles, including comparable or preferably identical reagents and reaction conditions). In certain embodiments, levels of oligonucleotides and/or diastereopurity can be determined by analytical methods, e.g., chromatographic, spectrometric, spectroscopic methods or any combinations thereof. Among other things, the present disclosure encompasses the recognition that stereorandom oligonucleotide preparations contain a plurality of distinct chemical entities that differ from one another, e.g., in the stereochemical structure (or stereochemistry) of individual backbone chiral centers within the oligonucleotide chain. Without control of stereochemistry of backbone chiral centers, stereorandom oligonucleotide preparations provide uncontrolled compositions comprising undetermined levels of oligonucleotide stereoisomers. Even though these stereoisomers may have the same base sequence and/or chemical modifications, they are different chemical entities at least due to their different backbone stereochemistry, and they can have, as demonstrated herein, different properties, e.g., sensitivity to nucleases, activities, distribution, etc. In certain embodiments, a particular stereoisomer may be defined, for example, by its base sequence, its length, its pattern of backbone linkages, and its pattern of backbone chiral centers. In certain embodiments, the present disclosure demonstrates that improvements in properties and activities achieved through control of stereochemistry within an oligonucleotide can be comparable to, or even better than those achieved through use of chemical modification.

[0149] Among other things, the present disclosure encompasses the recognition that stereorandom oligonucleotide preparations contain a plurality of distinct chemical entities that differ from one another, e.g., in the stereochemical structure (or stereochemistry) of individual backbone chiral centers within the oligonucleotide chain. Without control of stereochemistry of backbone chiral centers, stereorandom oligonucleotide preparations provide uncontrolled compositions comprising undetermined levels of oligonucleotide stereoisomers. Even though these stereoisomers may have the same base sequence and/or chemical modifications, they are different chemical entities at least due to their different backbone stereochemistry, and they can have, as demonstrated herein, different properties, e.g., sensitivity to nucleases, activities, distribution, etc. In certain embodiments, a particular stereoisomer may be defined, for example, by its base sequence, its length, its pattern of backbone linkages, and its pattern of backbone chiral centers. In certain embodiments, the present disclosure demonstrates that improvements in properties and activities achieved through control of stereochemistry within an oligonucleotide can be comparable to, or even better than those achieved through use of chemical modification

[0150] In some embodiments, a ds oligonucleotide targeting HSD17B13 or ds oligonucleotide targeting HSD17B13 composition is useful for prevention or treatment of a HSD17B13-associated condition, disorder, or disease, in a subject in need thereof. In some embodiments, the present disclosure provides a method for preventing or treating a HSD17B13-associated condition, disorder, or disease, comprising administering to a subject suffering therefrom or subject thereto a therapeutically effective amount of a provided ds oligonucleotide or a pharmaceutical composition that can deliver or comprise a therapeutically effective amount of a provided ds oligonucleotide. In some embodiments, the present disclosure provides pharmaceutical compositions which comprise a provided ds oligonucleotide targeting HSD17B13 and a pharmaceutically acceptable carrier. In some embodiments, oligonucleotides in a pharmaceutical composition are in one or more pharmaceutically acceptable salt forms, e.g., a sodium salt form, an ammonium salt form, etc.

[0151] In some embodiments, an oligonucleotide or oligonucleotide composition is useful for the manufacture of a medicament for prevention or treatment of a HSD17B13-associated condition, disorder, or disease, such as NAFLD, NASH, ASH, alcoholic liver disease, nonalcoholic liver disease, alcoholic cirrhosis, nonalcoholic cirrhosis, steatohepatitis, hepatic steatosis, hepatoceullar carcinoma, HCV hepatitis, chronic hepatitis, hereditary hemochromatosis, primary sclerosing cholangitis, drug induced liver injury, or hepatocellular necrosis, in a subject in need thereof.

[0152] Various HSD17B13-associated conditions, disorders, or diseases may be prevented and/or treated utilizing provided technologies (e.g., oligonucleotide, compositions, methods, etc.). In some embodiments, a condition, disorder, or disease is NAFLD. In some embodiments, a condition, disorder, or disease is NASH. In some embodiments, a condition, disorder, or disease is ASH.

### DETAILED DESCRIPTION OF CERTAIN EMBODIMENTS

[0153] Technologies of the present disclosure may be understood more readily by reference to the following detailed description of certain embodiments.

### Definitions

[0154] As used herein, the following definitions shall apply unless otherwise indicated. For purposes of this disclosure, the chemical elements are identified in accordance with the Periodic Table of the Elements, CAS version, Handbook of Chemistry and Physics, 75th Ed. Additionally, general principles of organic chemistry are described in “Organic Chemistry”, Thomas Sorrell, University Science Books, Sausalito: 1999, and “March's Advanced Organic Chemistry”, 5th Ed., Ed.: Smith, M. B. and March, J., John Wiley & Sons, New York: 2001.

[0155] As used herein in the present disclosure, unless otherwise clear from context, (i) the term “a” or “an” may be understood to mean “at least one”; (ii) the term “or” may be understood to mean “and/or”; (iii) the terms “comprising”, “comprise”, “including” (whether used with “not limited to” or not), and “include” (whether used with “not limited to” or not) may be understood to encompass itemized components or steps whether presented by themselves or together with one or more additional components or steps; (iv) the term “another” may be understood to mean at least an additional/second one or more; (v) the terms “about” and “approximately” may be understood to permit standard variation as would be understood by those of ordinary skill in the art; and (vi) where ranges are provided, endpoints are included.

[0156] Unless otherwise specified, description of oligonucleotides and elements thereof (e.g., base sequence, sugar modifications, internucleotidic linkages, linkage phosphorus stereochemistry, patterns thereof, etc.) is from 5′ to 3′. As those skilled in the art will appreciate, in some embodiments, oligonucleotides may be provided and/or utilized as salt forms, particularly pharmaceutically acceptable salt forms, e.g., sodium salts. Unless otherwise indicated, oligonucleotides include various forms of the oligonucleotides. As those skilled in the art will also appreciate, in some embodiments, individual oligonucleotides within a composition may be considered to be of the same constitution and/or structure even though, within such composition (e.g., a liquid composition), particular such oligonucleotides might be in different salt form(s) (and may be dissolved and the oligonucleotide chain may exist as an anion form when, e.g., in a liquid composition) at a particular moment in time. For example, those skilled in the art will appreciate that, at a given pH, individual internucleotidic linkages along an oligonucleotide chain may be in an acid (H) form, or in one of a plurality of possible salt forms (e.g., a sodium salt, or a salt of a different cation, depending on which ions might be present in the preparation or composition), and will understand that, so long as their acid forms (e.g., replacing all cations, if any, with H⁺) are of the same constitution and/or structure, such individual oligonucleotides may properly be considered to be of the same constitution and/or structure.

[0157] Analog: The term “analog” includes any chemical moiety which differs structurally from a reference chemical moiety or class of moieties, but which is capable of performing at least one function of such a reference chemical moiety or class of moieties. As non-limiting examples, a nucleotide analog differs structurally from a nucleotide but performs at least one function of a nucleotide; a nucleobase analog differs structurally from a nucleobase but performs at least one function of a nucleobase; etc.

[0158] Antisense: The term “antisense”, as used herein, refers to a characteristic of an oligonucleotide or other nucleic acid having a base sequence complementary or substantially complementary to a target nucleic acid to which it is capable of hybridizing. In some embodiments, a target nucleic acid is a target gene mRNA. In some embodiments, hybridization is required for or results in at one activity, e.g., a decrease in the level, expression or activity of the target nucleic acid or a gene product thereof. The term “antisense oligonucleotide”, as used herein, refers to an oligonucleotide complementary to a target nucleic acid. In some embodiments, an antisense oligonucleotide is capable of directing a decrease in the level, expression or activity of a target nucleic acid or a product thereof. In some embodiments, an antisense oligonucleotide is capable of directing a decrease in the level, expression or activity of the target nucleic acid or a product thereof, via a mechanism that involves RNA interference.

[0159] Chiral control: As used herein, “chiral control” refers to control of the stereochemical designation of the chiral linkage phosphorus in a chiral internucleotidic linkage within an oligonucleotide. As used herein, a chiral internucleotidic linkage is an internucleotidic linkage whose linkage phosphorus is chiral. In some embodiments, a control is achieved through a chiral element that is absent from the sugar and base moieties of an oligonucleotide, for example, in some embodiments, a control is achieved through use of one or more chiral auxiliaries during oligonucleotide preparation as described in the present disclosure, which chiral auxiliaries often are part of chiral phosphoramidites used during oligonucleotide preparation. In contrast to chiral control, a person having ordinary skill in the art appreciates that conventional oligonucleotide synthesis which does not use chiral auxiliaries cannot control stereochemistry at a chiral internucleotidic linkage if such conventional oligonucleotide synthesis is used to form the chiral internucleotidic linkage. In some embodiments, the stereochemical designation of each chiral linkage phosphorus in each chiral internucleotidic linkage within an oligonucleotide is controlled.

[0160] Chirally controlled oligonucleotide composition: The terms “chirally controlled oligonucleotide composition”, “chirally controlled nucleic acid composition”, and the like, as used herein, refers to a composition that comprises a plurality of oligonucleotides (or nucleic acids) which share 1) a common base sequence, 2) a common pattern of backbone linkages, and 3) a common pattern of backbone phosphorus modifications, wherein the plurality of oligonucleotides (or nucleic acids) share the same linkage phosphorus stereochemistry at one or more chiral internucleotidic linkages (chirally controlled or stereodefined internucleotidic linkages, whose chiral linkage phosphorus is Rp or Sp in the composition (“stereodefined”), not a random Rp and Sp mixture as non-chirally controlled internucleotidic linkages). Level of the plurality of oligonucleotides (or nucleic acids) in a chirally controlled oligonucleotide composition is pre-determined/controlled (e.g., through chirally controlled oligonucleotide preparation to stereoselectively form one or more chiral internucleotidic linkages). In some embodiments, about 1%-100%, (e.g., about 5%/o-100%, 10%-100%, 20%-100%, 30%-100%, 40%-100%, 50%-100%, 60%-100%, 70%-100%, 80-100%, 90-100%, 95-100%, 50%-90%, or about 5%, 10%, 20%, 30%, 40%, 50%, 60%, 70%, 80%, 85%, 90%, 91%, 92%, 93%, 94%, 95%, 96%, 97%, 98%, 99%, or 100%, or at least 5%, 10%, 20%, 30%, 40%, 50%, 60%, 70%, 80%, 85%, 90%, 91%, 92%, 93%, 94%, 95%, 96%, 97%, 98%, or 99%) of all oligonucleotides in a chirally controlled oligonucleotide composition are oligonucleotides of the plurality. In some embodiments, about 1%-100%, (e.g., about 5%-100%, 10%-100%, 20%-100%, 30%-100%, 40%-100%, 50%-100%, 60%-100%, 70%-100%, 80-100%, 90-100%, 95-100%, 50%-90%, or about 5%, 10%, 20%, 30%, 40%, 50%, 60%, 70%, 80%, 85%, 90%, 91%, 92%, 93%, 94%, 95%, 96%, 97%, 98%, 99%, or 100%, or at least 5%, 10%, 20%, 30%, 40%, 50%, 60%, 70%, 80%, 85%, 90%, 91%, 92%, 93%, 94%, 95%, 96%, 97%, 98%, or 99%) of all oligonucleotides in a chirally controlled oligonucleotide composition that share the common base sequence, the common pattern of backbone linkages, and the common pattern of backbone phosphorus modifications are oligonucleotides of the plurality. In some embodiments, a level is about 1%-100%, (e.g., about 5%-100%, 10%-100%, 20%-100%, 30%-100%, 40%-100%, 50%-100%, 60%-100%, 70%-100%, 80-100%, 90-100%, 95-100%, 50%-90%, or about 5%, 10%, 20%, 30%, 40%, 50%, 60%, 70%, 80%, 85%, 90%, 91%, 92%, 93%, 94%, 95%, 96%, 97%, 98%, 99%, or 100%, or at least 5%, 10%, 20%, 30%, 40%, 50%, 60%, 70%, 80%, 85%, 90%, 91%, 92%, 93%, 94%, 95%, 96%, 97%, 98%, or 99%) of all oligonucleotides in a composition, or of all oligonucleotides in a composition that share a common base sequence (e.g., of a plurality of oligonucleotide or an oligonucleotide type), or of all oligonucleotides in a composition that share a common base sequence, a common pattern of backbone linkages, and a common pattern of backbone phosphorus modifications, or of all oligonucleotides in a composition that share a common base sequence, a common patter of base modifications, a common pattern of sugar modifications, a common pattern of internucleotidic linkage types, and/or a common pattern of internucleotidic linkage modifications. In some embodiments, the plurality of oligonucleotides share the same stereochemistry at about 1-50 chiral internucleotidic linkages. In some embodiments, the plurality of oligonucleotides share the same stereochemistry at about 1%-100% of chiral internucleotidic linkages. In some embodiments, oligonucleotides (or nucleic acids) of a plurality are of the same constitution (as appreciated by those skilled in the art, in some embodiments may exist in one or more forms, e.g., acid forms, salt forms, etc.). In some embodiments, level of the oligonucleotides (or nucleic acids) of the plurality is about 1%-100% of all oligonucleotides (or nucleic acids) in a composition that share the same constitution as the oligonucleotides (or nucleic acids) of the plurality. In some embodiments, each chiral internucleotidic linkage is a chiral controlled internucleotidic linkage, and the composition is a completely chirally controlled oligonucleotide composition. In some embodiments, oligonucleotides (or nucleic acids) of a plurality are structurally identical. In some embodiments, a chirally controlled internucleotidic linkage has a diastereopurity of at least 80%, 85%, 90%, 91%, 92%, 93%, 94%, 95%, 96%, 97%, 98%, 99% or 99.5%, typically at least 90%, 91%, 92%, 93%, 94%, 95%, 96%, 97%, 98%, 99% or 99.5%. In some embodiments, a chirally controlled internucleotidic linkage has a diastereopurity of at least 95%. In some embodiments, a chirally controlled internucleotidic linkage has a diastereopurity of at least 96%. In some embodiments, a chirally controlled internucleotidic linkage has a diastereopurity of at least 97%. In some embodiments, a chirally controlled internucleotidic linkage has a diastereopurity of at least 98%. In some embodiments, a chirally controlled internucleotidic linkage has a diastereopurity of at least 99%. In some embodiments, a percentage (e.g., a level as described herein) is or is at least (DS)^{nc}, wherein DS is a diastereopurity as described in the present disclosure (e.g., 90%, 91%, 92%, 93%, 94%, 95%, 96%, 97%, 98%, 99% or 99.5% or more) and nc is the number of chirally controlled internucleotidic linkages as described in the present disclosure (e.g., 1-50, 1-40, 1-30, 1-25, 1-20, 5-50, 5-40, 5-30, 5-25, 5-20, 1, 2, 3, 4, 5, 6, 7, 8, 9, 10, 11, 12, 13, 14, 15, 16, 17, 18, 19, 20, 21, 22, 23, 24, 25 or more). In some embodiments, a percentage (e.g., a level as described herein) is or is at least (DS)^{nc}, wherein DS is 95%-100%. For example, when DS is 99% and nc is 10, the percentage is or is at least 90% ((99%)¹⁰≈0.90=90%). In some embodiments, level of a plurality of oligonucleotides in a composition is represented as the product of the diastereopurity of each chirally controlled internucleotidic linkage in the oligonucleotides. In some embodiments, diastereopurity of an internucleotidic linkage connecting two nucleosides in an oligonucleotide (or nucleic acid) is represented by the diastereopurity of an internucleotidic linkage of a dimer connecting the same two nucleosides, wherein the dimer is prepared using comparable conditions, in some instances, identical synthetic cycle conditions (e.g., for the linkage between Nx and Ny in an oligonucleotide . . . NxNy . . . , the dimer is NxNy). In some embodiments, not all chiral internucleotidic linkages are chiral controlled internucleotidic linkages, and the composition is a partially chirally controlled oligonucleotide composition. In some embodiments, a non-chirally controlled internucleotidic linkage has a diastereopurity of less than about 80%, 75%, 70%, 65%, 60%, 55%, or of about 50%, as typically observed in stereorandom oligonucleotide compositions (e.g., as appreciated by those skilled in the art, from traditional oligonucleotide synthesis, e.g., the phosphoramidite method). In some embodiments, oligonucleotides (or nucleic acids) of a plurality are of the same type. In some embodiments, a chirally controlled oligonucleotide composition comprises non-random or controlled levels of individual oligonucleotide or nucleic acids types. For instance, in some embodiments a chirally controlled oligonucleotide composition comprises one and no more than one oligonucleotide type. In some embodiments, a chirally controlled oligonucleotide composition comprises more than one oligonucleotide type. In some embodiments, a chirally controlled oligonucleotide composition comprises multiple oligonucleotide types. In some embodiments, a chirally controlled oligonucleotide composition is a composition of oligonucleotides of an oligonucleotide type, which composition comprises a non-random or controlled level of a plurality of oligonucleotides of the oligonucleotide type.

[0161] Internucleotidic linkage: As used herein, the phrase “internucleotidic linkage” refers generally to a linkage linking nucleoside units of an oligonucleotide or a nucleic acid. In some embodiments, an internucleotidic linkage is a phosphodiester linkage, as extensively found in naturally occurring DNA and RNA molecules (natural phosphate linkage (—OP(═O)(OH)O—), which as appreciated by those skilled in the art may exist as a salt form). In some embodiments, an internucleotidic linkage is a modified internucleotidic linkage (not a natural phosphate linkage). In some embodiments, an internucleotidic linkage is a “modified internucleotidic linkage” wherein at least one oxygen atom or —OH of a phosphodiester linkage is replaced by a different organic or inorganic moiety. In some embodiments, such an organic or inorganic moiety is selected from ═S, ═Se, ═NR′, —SR′, —SeR′, —N(R′)₂, B(R′)₃, —S—, —Se—, and —N(R′)—, wherein each R′ is independently as defined and described in the present disclosure. In some embodiments, an internucleotidic linkage is a phosphotriester linkage, phosphorothioate linkage (or phosphorothioate diester linkage, —OP(═O)(SH)O—, which as appreciated by those skilled in the art may exist as a salt form), or phosphorothioate triester linkage. In some embodiments, a modified internucleotidic linkage is a phosphorothioate linkage. In some embodiments, an internucleotidic linkage is one of, e.g., PNA (peptide nucleic acid) or PMO (phosphorodiamidate Morpholino oligomer) linkage. In some embodiments, a modified internucleotidic linkage is a non-negatively charged internucleotidic linkage. In some embodiments, a modified internucleotidic linkage is a neutral internucleotidic linkage (e.g., n001 in certain provided oligonucleotides). It is understood by a person of ordinary skill in the art that an internucleotidic linkage may exist as an anion or cation at a given pH due to the existence of acid or base moieties in the linkage. In some embodiments, a modified internucleotidic linkages is a modified internucleotidic linkages designated as s, s1, s2, s3, s4, s5, s6, s7, s8, s9, s10, s11, s12, s13, s14, s15, s16, s17 and s18 as described in WO 2017/210647.

[0162] In vitro: As used herein, the term “in vitro” refers to events that occur in an artificial environment, e.g., in a test tube or reaction vessel, in cell culture, etc., rather than within an organism (e.g., animal, plant and/or microbe).

[0163] In vivo: As used herein, the term “in vivo” refers to events that occur within an organism (e.g., animal, plant and/or microbe).

[0164] Linkage phosphorus: as defined herein, the phrase “linkage phosphorus” is used to indicate that the particular phosphorus atom being referred to is the phosphorus atom present in the internucleotidic linkage, which phosphorus atom corresponds to the phosphorus atom of a phosphodiester internucleotidic linkage as occurs in naturally occurring DNA and RNA. In some embodiments, a linkage phosphorus atom is in a modified internucleotidic linkage, wherein each oxygen atom of a phosphodiester linkage is optionally and independently replaced by an organic or inorganic moiety. In some embodiments, a linkage phosphorus atom is the P of Formula I as described herein. In some embodiments, a linkage phosphorus atom is chiral. In some embodiments, a linkage phosphorus atom is achiral (e.g., as in natural phosphate linkages).

[0165] Linker: The terms “linker”, “linking moiety” and the like refer to any chemical moiety which connects one chemical moiety to another. As appreciated by those skilled in the art, a linker can be bivalent or trivalent or more, depending on the number of chemical moieties the linker connects. In some embodiments, a linker is a moiety which connects one oligonucleotide to another oligonucleotide in a multimer. In some embodiments, a linker is a moiety optionally positioned between the terminal nucleoside and the solid support or between the terminal nucleoside and another nucleoside, nucleotide, or nucleic acid. In some embodiments, in an oligonucleotide a linker connects a chemical moiety (e.g., a targeting moiety, a lipid moiety, a carbohydrate moiety, etc.) with an oligonucleotide chain (e.g., through its 5′-end, 3′-end, nucleobase, sugar, internucleotidic linkage, etc.)

[0166] Modified nucleobase: The terms “modified nucleobase”, “modified base” and the like refer to a chemical moiety which is chemically distinct from a nucleobase, but which is capable of performing at least one function of a nucleobase. In some embodiments, a modified nucleobase is a nucleobase which comprises a modification. In some embodiments, a modified nucleobase is capable of at least one function of a nucleobase, e.g., forming a moiety in a polymer capable of base-pairing to a nucleic acid comprising an at least complementary sequence of bases. In some embodiments, a modified nucleobase is substituted A, T, C, G, or U, or a substituted tautomer of A, T, C, G, or U. In some embodiments, a modified nucleobase in the context of oligonucleotides refer to a nucleobase that is not A, T, C, G or U.

[0167] Modified nucleoside: The term “modified nucleoside” refers to a moiety derived from or chemically similar to a natural nucleoside, but which comprises a chemical modification which differentiates it from a natural nucleoside. Non-limiting examples of modified nucleosides include those which comprise a modification at the base and/or the sugar. Non-limiting examples of modified nucleosides include those with a 2′ modification at a sugar. Non-limiting examples of modified nucleosides also include abasic nucleosides (which lack a nucleobase). In some embodiments, a modified nucleoside is capable of at least one function of a nucleoside, e.g., forming a moiety in a polymer capable of base-pairing to a nucleic acid comprising an at least complementary sequence of bases.

[0168] Modified nucleotide: The term “modified nucleotide” includes any chemical moiety which differs structurally from a natural nucleotide but is capable of performing at least one function of a natural nucleotide. In some embodiments, a modified nucleotide comprises a modification at a sugar, base and/or internucleotidic linkage. In some embodiments, a modified nucleotide comprises a modified sugar, modified nucleobase and/or modified internucleotidic linkage. In some embodiments, a modified nucleotide is capable of at least one function of a nucleotide, e.g., forming a subunit in a polymer capable of base-pairing to a nucleic acid comprising an at least complementary sequence of bases.

[0169] Modified sugar: The term “modified sugar” refers to a moiety that can replace a sugar. A modified sugar mimics the spatial arrangement, electronic properties, or some other physicochemical property of a sugar. In some embodiments, as described in the present disclosure, a modified sugar is substituted ribose or deoxyribose. In some embodiments, a modified sugar comprises a 2′-modification. Examples of useful 2′-modification are widely utilized in the art and described herein. In some embodiments, a 2′-modification is 2′-OR, wherein R is optionally substituted C₁₋₁₀ aliphatic. In some embodiments, a 2′-modification is 2′-OMe. In some embodiments, a 2′-modification is 2′-MOE. In some embodiments, a modified sugar is a bicyclic sugar (e.g., a sugar used in LNA, BNA, etc.). In some embodiments, in the context of oligonucleotides, a modified sugar is a sugar that is not ribose or deoxyribose as typically found in natural RNA or DNA.

[0170] Nucleic acid: The term “nucleic acid”, as used herein, includes any nucleotides and polymers thereof. The term “polynucleotide”, as used herein, refers to a polymeric form of nucleotides of any length, either ribonucleotides (RNA) or deoxyribonucleotides (DNA) or a combination thereof. These terms refer to the primary structure of the molecules and, thus, include double- and single-stranded DNA, and double- and single-stranded RNA. These terms include, as equivalents, analogs of either RNA or DNA comprising modified nucleotides and/or modified polynucleotides, such as, though not limited to, methylated, protected and/or capped nucleotides or polynucleotides. The terms encompass poly- or oligo-ribonucleotides (RNA) and poly- or oligo-deoxyribonucleotides (DNA); RNA or DNA derived from N-glycosides or C-glycosides of nucleobases and/or modified nucleobases; nucleic acids derived from sugars and/or modified sugars; and nucleic acids derived from phosphate bridges and/or modified internucleotidic linkages. The term encompasses nucleic acids containing any combinations of nucleobases, modified nucleobases, sugars, modified sugars, phosphate bridges or modified internucleotidic linkages. Examples include, and are not limited to, nucleic acids containing ribose moieties, nucleic acids containing deoxy-ribose moieties, nucleic acids containing both ribose and deoxyribose moieties, nucleic acids containing ribose and modified ribose moieties. Unless otherwise specified, the prefix poly- refers to a nucleic acid containing 2 to about 10,000 nucleotide monomer units and wherein the prefix oligo- refers to a nucleic acid containing 2 to about 200 nucleotide monomer units.

[0171] Nucleobase: The term “nucleobase” refers to the parts of nucleic acids that are involved in the hydrogen-bonding that binds one nucleic acid strand to another complementary strand in a sequence specific manner. The most common naturally-occurring nucleobases are adenine (A), guanine (G), uracil (U), cytosine (C), and thymine (T). In some embodiments, a naturally-occurring nucleobases are modified adenine, guanine, uracil, cytosine, or thymine. In some embodiments, a naturally-occurring nucleobases are methylated adenine, guanine, uracil, cytosine, or thymine. In some embodiments, a nucleobase comprises a heteroaryl ring wherein a ring atom is nitrogen, and when in a nucleoside, the nitrogen is bonded to a sugar moiety. In some embodiments, a nucleobase comprises a heterocyclic ring wherein a ring atom is nitrogen, and when in a nucleoside, the nitrogen is bonded to a sugar moiety. In some embodiments, a nucleobase is a “modified nucleobase,” a nucleobase other than adenine (A), guanine (G), uracil (U), cytosine (C), and thymine (T). In some embodiments, a modified nucleobase is substituted A, T, C, G or U. In some embodiments, a modified nucleobase is a substituted tautomer of A, T, C, G, or U. In some embodiments, a modified nucleobases is methylated adenine, guanine, uracil, cytosine, or thymine. In some embodiments, a modified nucleobase mimics the spatial arrangement, electronic properties, or some other physicochemical property of the nucleobase and retains the property of hydrogen-bonding that binds one nucleic acid strand to another in a sequence specific manner. In some embodiments, a modified nucleobase can pair with all of the five naturally occurring bases (uracil, thymine, adenine, cytosine, or guanine) without substantially affecting the melting behavior, recognition by intracellular enzymes or activity of the oligonucleotide duplex. As used herein, the term “nucleobase” also encompasses structural analogs used in lieu of natural or naturally-occurring nucleotides, such as modified nucleobases and nucleobase analogs. In some embodiments, a nucleobase is optionally substituted A, T, C, G, or U, or an optionally substituted tautomer of A, T, C, G, or U. In some embodiments, a “nucleobase” refers to a nucleobase unit in an oligonucleotide or a nucleic acid (e.g., A, T, C, G or U as in an oligonucleotide or a nucleic acid).

[0172] Nucleoside: The term “nucleoside” refers to a moiety wherein a nucleobase or a modified nucleobase is covalently bound to a sugar or a modified sugar. In some embodiments, a nucleoside is a natural nucleoside, e.g., adenosine, deoxyadenosine, guanosine, deoxyguanosine, thymidine, uridine, cytidine, or deoxycytidine. In some embodiments, a nucleoside is a modified nucleoside, e.g., a substituted natural nucleoside selected from adenosine, deoxyadenosine, guanosine, deoxyguanosine, thymidine, uridine, cytidine, and deoxycytidine. In some embodiments, a nucleoside is a modified nucleoside, e.g., a substituted tautomer of a natural nucleoside selected from adenosine, deoxyadenosine, guanosine, deoxyguanosine, thymidine, uridine, cytidine, and deoxycytidine. In some embodiments, a “nucleoside” refers to a nucleoside unit in an oligonucleotide or a nucleic acid.

[0173] Nucleotide: The term “nucleotide” as used herein refers to a monomeric unit of a polynucleotide that consists of a nucleobase, a sugar, and one or more internucleotidic linkages (e.g., phosphate linkages in natural DNA and RNA). The naturally occurring bases [guanine, (G), adenine, (A), cytosine, (C), thymine, (T), and uracil (U)] are derivatives of purine or pyrimidine, though it should be understood that naturally and non-naturally occurring base analogs are also included. The naturally occurring sugar is the pentose (five-carbon sugar) deoxyribose (which forms DNA) or ribose (which forms RNA), though it should be understood that naturally and non-naturally occurring sugar analogs are also included. Nucleotides are linked via internucleotidic linkages to form nucleic acids, or polynucleotides. Many internucleotidic linkages are known in the art (such as, though not limited to, phosphate, phosphorothioates, boranophosphates and the like). Artificial nucleic acids include PNAs (peptide nucleic acids), phosphotriesters, phosphorothionates, H-phosphonates, phosphoramidates, boranophosphates, methylphosphonates, phosphonoacetates, thiophosphonoacetates and other variants of the phosphate backbone of native nucleic acids, such as those described herein. In some embodiments, a natural nucleotide comprises a naturally occurring base, sugar and internucleotidic linkage. As used herein, the term “nucleotide” also encompasses structural analogs used in lieu of natural or naturally-occurring nucleotides, such as modified nucleotides and nucleotide analogs. In some embodiments, a “nucleotide” refers to a nucleotide unit in an oligonucleotide or a nucleic acid.

[0174] Oligonucleotide: The term “oligonucleotide” refers to a polymer or oligomer of nucleotides, and may contain any combination of natural and non-natural nucleobases, sugars, and internucleotidic linkages.

[0175] Oligonucleotides can be single-stranded or double-stranded. A single-stranded oligonucleotide can have double-stranded regions (formed by two portions of the single-stranded oligonucleotide) and a double-stranded oligonucleotide, which comprises two oligonucleotide chains, can have single-stranded regions for example, at regions where the two oligonucleotide chains are not complementary to each other. Example oligonucleotides include, but are not limited to structural genes, genes including control and termination regions, self-replicating systems such as viral or plasmid DNA, single-stranded and double-stranded RNAi agents and other RNA interference reagents (RNAi agents or iRNA agents), shRNA, antisense oligonucleotides, ribozymes, microRNAs, microRNA mimics, supermirs, aptamers, antimirs, antagomirs, Ul adaptors, triplex-forming oligonucleotides, G-quadruplex oligonucleotides, RNA activators, immuno-stimulatory oligonucleotides, and decoy oligonucleotides.

[0176] Oligonucleotides of the present disclosure can be of various lengths. In particular embodiments, oligonucleotides can range from about 2 to about 200 nucleosides in length. In various related embodiments, oligonucleotides, single-stranded, double-stranded, or triple-stranded, can range in length from about 4 to about 10 nucleosides, from about 10 to about 50 nucleosides, from about 20 to about 50 nucleosides, from about 15 to about 30 nucleosides, from about 20 to about 30 nucleosides in length. In some embodiments, the oligonucleotide is from about 9 to about 39 nucleosides in length. In some embodiments, the oligonucleotide is at least 4, 5, 6, 7, 8, 9, 10, 11, 12, 13, 14, 15, 16, 17, 18, 19, 20, 21, 22, 23, 24, or 25 nucleosides in length. In some embodiments, the oligonucleotide is at least 19 nucleosides in length. In some embodiments, the oligonucleotide is at least 20 nucleosides in length. In some embodiments, the oligonucleotide is at least 25 nucleosides in length. In some embodiments, the oligonucleotide is at least 30 nucleosides in length. In some embodiments, the oligonucleotide is a duplex of complementary strands of at least 18 nucleosides in length. In some embodiments, the oligonucleotide is a duplex of complementary strands of at least 21 nucleosides in length. In some embodiments, each nucleoside counted in an oligonucleotide length independently comprises A, T, C, G, or U, or optionally substituted A, T, C, G, or U, or an optionally substituted tautomer of A, T, C, G or U.

[0177] Oligonucleotide type: As used herein, the phrase “oligonucleotide type” is used to define an oligonucleotide that has a particular base sequence, pattern of backbone linkages (i.e., pattern of internucleotidic linkage types, for example, phosphate, phosphorothioate, phosphorothioate triester, etc.), pattern of backbone chiral centers [i.e., pattern of linkage phosphorus stereochemistry (Rp/Sp)], and pattern of backbone phosphorus modifications (e.g., pattern of “—XLR¹” groups in Formula I as described herein). In some embodiments, oligonucleotides of a common designated “type” are structurally identical to one another.

[0178] One of skill in the art will appreciate that synthetic methods of the present disclosure provide for a degree of control during the synthesis of an oligonucleotide strand such that each nucleotide unit of the oligonucleotide strand can be designed and/or selected in advance to have a particular stereochemistry at the linkage phosphorus and/or a particular modification at the linkage phosphorus, and/or a particular base, and/or a particular sugar. In some embodiments, an oligonucleotide strand is designed and/or selected in advance to have a particular combination of stereocenters at the linkage phosphorus. In some embodiments, an oligonucleotide strand is designed and/or determined to have a particular combination of modifications at the linkage phosphorus. In some embodiments, an oligonucleotide strand is designed and/or selected to have a particular combination of bases. In some embodiments, an oligonucleotide strand is designed and/or selected to have a particular combination of one or more of the above structural characteristics. In some embodiments, the present disclosure provides compositions comprising or consisting of a plurality of oligonucleotide molecules (e.g., chirally controlled oligonucleotide compositions). In some embodiments, all such molecules are of the same type (i.e., are structurally identical to one another). In some embodiments, however, provided compositions comprise a plurality of oligonucleotides of different types, typically in pre-determined relative amounts.

[0179] Optionally Substituted: As described herein, compounds, e.g., oligonucleotides, of the disclosure may contain optionally substituted and/or substituted moieties. In general, the term “substituted,” whether preceded by the term “optionally” or not, means that one or more hydrogens of the designated moiety are replaced with a suitable substituent. Unless otherwise indicated, an “optionally substituted” group may have a suitable substituent at each substitutable position of the group, and when more than one position in any given structure may be substituted with more than one substituent selected from a specified group, the substituent may be either the same or different at every position. In some embodiments, an optionally substituted group is unsubstituted. Combinations of substituents envisioned by this disclosure are preferably those that result in the formation of stable or chemically feasible compounds. The term “stable,” as used herein, refers to compounds that are not substantially altered when subjected to conditions to allow for their production, detection, and, in certain embodiments, their recovery, purification, and use for one or more of the purposes disclosed herein. Certain substituents are described below.

[0180] Suitable monovalent substituents on a substitutable atom, e.g., a suitable carbon atom, are independently halogen; —(CH₂)₀₋₄R^{∘}; —(CH₂)₀₋₄OR^{∘}; —O(CH₂)₀₋₄R^{∘}, —O—(CH₂)₀₋₄C(O)OR^{∘}; —(CH₂)₀₋₄CH(OR^{∘})₂; —(CH₂)₀₋₄Ph, which may be substituted with R^{∘}; —(CH₂)₀₋₄O(CH₂)₀₋₁Ph which may be substituted with R^{∘}; —CH═CHPh, which may be substituted with R^{∘}; —(CH₂)₀₋₄O(CH₂)₀₋₁-pyridyl which may be substituted with R^{∘}; —NO₂; —CN; —N₃; —(CH₂)₀₋₄N(R^{∘})₂; —(CH₂)₀₋₄N(R^{∘})C(O)R^{∘}; —N(R^{∘})C(S)R^{∘}; —(CH₂)₀₋₄N(R^{∘})C(O)NR^{∘}₂; —N(R^{∘})C(S)NR^{∘}₂; —(CH₂)₀₋₄N(R^{∘})C(O)OR^{∘}; —N(R^{∘})N(R^{∘})C(O)R^{∘}; —N(R^{∘})N(R^{∘})C(O)NR^{∘}₂; —N(R^{∘})N(R^{∘})C(O)OR^{∘}; —(CH₂)₀₋₄C(O)R^{∘}; —C(S)R^{∘}; —(CH₂)₀₋₄C(O)OR^{∘}; —(CH₂)₀₋₄C(O)SR^{∘}; —(CH₂)₀₋₄C(O)OSiR^{∘}₃; —(CH₂)₀₋₄OC(O)R^{∘}; —OC(O)(CH₂)₀₋₄SR^{∘}, —SC(S)SR^{∘}; —(CH₂)₀₋₄SC(O)R^{∘}; —(CH₂)₀₋₄C(O)NR^{∘}₂; —C(S)NR^{∘}₂; —C(S)SR^{∘}; —(CH₂)₀₋₄OC(O)NR^{∘}₂; —C(O)N(OR^{∘})R^{∘}; —C(O)C(O)R^{∘}; —C(O)CH₂C(O)R^{∘}; —C(NOR^{∘})R^{∘}; —(CH₂)₀₋₄SSR^{∘}; —(CH₂)₀₋₄S(O)₂R^{∘}; —(CH₂)₀₋₄S(O)₂OR^{∘}; —(CH₂)₀₋₄OS(O)₂R^{∘}; —S(O)₂NR^{∘}₂; —(CH₂)₀₋₄S(O)R^{∘}; —N(R^{∘})S(O)₂NR^{∘}₂; —N(R^{∘})S(O)₂R^{∘}; —N(OR^{∘})R^{∘}; —C(NH)NR^{∘}₂; —Si(R^{∘})₃; —OSi(R^{∘})₃; —B(R^{∘})₂; —OB(R^{∘})₂; —OB(OR^{∘})₂; —P(R^{∘})₂; —P(OR^{∘})₂; —P(R^{∘})(OR^{∘}); —OP(R^{∘})₂; —OP(OR^{∘})₂; —OP(R^{∘})(OR^{∘}); —P(O)(R^{∘})₂; —P(O)(OR^{∘})₂; —OP(O)(R^{∘})₂; —OP(O)(OR^{∘})₂; —OP(O)(OR^{∘})(SR^{∘}); —SP(O)(R^{∘})₂; —SP(O)(OR^{∘})₂; —N(R^{∘})P(O)(R^{∘})₂; —N(R^{∘})P(O)(OR^{∘})₂; —P(R^{∘})₂[B(R^{∘})₃]; —P(OR^{∘})₂[B(R^{∘})₃]; —OP(R^{∘})₂[B(R^{∘})₃]; —OP(OR^{∘})₂[B(R^{∘})₃]; —(C₁₋₄ straight or branched alkylene)O—N(R^{∘})₂; or —(C₁₋₄ straight or branched alkylene)C(O)O—N(R^{∘})₂, wherein each R^{∘} may be substituted as defined herein and is independently hydrogen, C₁₋₂₀ aliphatic, C₁₋₂₀ heteroaliphatic having 1-5 heteroatoms independently selected from nitrogen, oxygen, sulfur, silicon and phosphorus, —CH₂—(C₁₋₄ aryl), —O(CH₂)₀₋₁(C₆₋₁₄ aryl), —CH₂-(5-14 membered heteroaryl ring), a 5-20 membered, monocyclic, bicyclic, or polycyclic, saturated, partially unsaturated or aryl ring having 0-5 heteroatoms independently selected from nitrogen, oxygen, sulfur, silicon and phosphorus, or, notwithstanding the definition above, two independent occurrences of R^{∘}, taken together with their intervening atom(s), form a 5-20 membered, monocyclic, bicyclic, or polycyclic, saturated, partially unsaturated or aryl ring having 0-5 heteroatoms independently selected from nitrogen, oxygen, sulfur, silicon and phosphorus, which may be substituted as defined below.

[0181] Suitable monovalent substituents on R^{∘} (or the ring formed by taking two independent occurrences of R^{∘} together with their intervening atoms), are independently halogen, —(CH₂)₀₋₂R^{●}, -(haloR^{●}), —(CH₂)₀₋₂OH, —(CH₂)₀₋₂OR^{●}, —(CH₂)₀₋₂CH(OR^{●})₂; —O(haloR^{●}), —CN, —N₃, —(CH₂)₀₋₂C(O)R^{●}, —(CH₂)₀₋₂C(O)OH, —(CH₂)₀₋₂C(O)OR^{●}, —(CH₂)₀₋₂SR^{●}, —(CH₂)₀₋₂SH, —(CH₂)₀₋₂NH₂, —(CH₂)₀₋₂NHR^{●}, —(CH₂)₀₋₂NR′2, —NO₂, —SiR^{●}₃, —OSiR^{●}₃, —C(O)SR^{●}, —(C₁₋₄ straight or branched alkylene)C(O)OR^{●}, or —SSR^{●} wherein each R^{●} is unsubstituted or where preceded by “halo” is substituted only with one or more halogens, and is independently selected from C₁₋₄ aliphatic, —CH₂Ph, —O(CH₂)₀₋₁Ph, and a 5-6-membered saturated, partially unsaturated, or aryl ring having 0-4 heteroatoms independently selected from nitrogen, oxygen, and sulfur. Suitable divalent substituents on a saturated carbon atom of R^{∘} include ═O and ═S.

[0182] Suitable divalent substituents, e.g., on a suitable carbon atom, are independently the following: ═O, ═S, ═NNR*₂, ═NNHC(O)R*, ═NNHC(O)OR*, ═NNHS(O)₂R*, ═NR*, ═NOR*, —O(C(R*₂))₂₋₃O—, or —S(C(R*₂))₂₋₃S—, wherein each independent occurrence of R* is selected from hydrogen, C₁₋₆ aliphatic which may be substituted as defined below, and an unsubstituted 5-6-membered saturated, partially unsaturated, or aryl ring having 0-4 heteroatoms independently selected from nitrogen, oxygen, and sulfur. Suitable divalent substituents that are bound to vicinal substitutable carbons of an “optionally substituted” group include: —O(CR*₂)₂₋₃O—, wherein each independent occurrence of R* is selected from hydrogen, C₁₋₆ aliphatic which may be substituted as defined below, and an unsubstituted 5-6-membered saturated, partially unsaturated, and aryl ring having 0-4 heteroatoms independently selected from nitrogen, oxygen, and sulfur.

[0183] Suitable substituents on the aliphatic group of R* are independently halogen, —R^{●}, -(haloR^{●}), —OH, —OR^{●}, —O(haloR^{●}), —CN, —C(O)OH, —C(O)OR^{●}, —NH₂, —NHR^{●}, —NR^{●}₂, or —NO₂, wherein each R^{●} is unsubstituted or where preceded by “halo” is substituted only with one or more halogens, and is independently C₁₋₄ aliphatic, —CH₂Ph, —O(CH₂)₀₋₁Ph, or a 5-6-membered saturated, partially unsaturated, or aryl ring having 0-4 heteroatoms independently selected from nitrogen, oxygen, and sulfur.

[0184] In some embodiments, suitable substituents on a substitutable nitrogen are independently —R^{†}, —NR^{†}₂, —C(O)R^{†}, —C(O)OR^{†}, —C(O)C(O)R^{†}, —C(O)CH₂C(O)R^{†}, —S(O)₂R^{†}, —S(O)₂NR^{†}₂, —C(S)NR^{†}₂, —C(NH)NR^{†}₂, or —N(R^{†})S(O)₂R^{†}; wherein each R^{†} is independently hydrogen, C₁₋₆ aliphatic which may be substituted as defined below, unsubstituted —OPh, or an unsubstituted 5-6-membered saturated, partially unsaturated, or aryl ring having 0-4 heteroatoms independently selected from nitrogen, oxygen, and sulfur, or, notwithstanding the definition above, two independent occurrences of R^{†}, taken together with their intervening atom(s) form an unsubstituted 3-12-membered saturated, partially unsaturated, or aryl mono- or bicyclic ring having 04 heteroatoms independently selected from nitrogen, oxygen, and sulfur.

[0185] Suitable substituents on the aliphatic group of R^{†} are independently halogen, —R^{●}, -(haloR^{●}), —OH, —OR^{●}, —O(haloR^{●}), —CN, —C(O)OH, —C(O)OR^{●}, —NH₂, —NHR^{●}, —NR^{●}₂, or —NO₂, wherein each R^{●} is unsubstituted or where preceded by “halo” is substituted only with one or more halogens, and is independently C₁₋₄ aliphatic, —CH₂Ph, —O(CH₂)₀₋₁Ph, or a 5-6-membered saturated, partially unsaturated, or aryl ring having 0-4 heteroatoms independently selected from nitrogen, oxygen, and sulfur.

[0186] Oral: The phrases “oral administration” and “administered orally” as used herein have their art-understood meaning referring to administration by mouth of a compound or composition.

[0187] Parenteral: The phrases “parenteral administration” and “administered parenterally” as used herein have their art-understood meaning referring to modes of administration other than enteral and topical administration, usually by injection, and include, without limitation, intravenous, intramuscular, intraarterial, intrathecal, intracapsular, intraorbital, intracardiac, intradermal, intraperitoneal, transtracheal, subcutaneous, subcuticular, intraarticulare, subcapsular, subarachnoid, intraspinal, and intrasternal injection and infusion.

[0188] Partially unsaturated: As used herein, the term “partially unsaturated” refers to a ring moiety that includes at least one double or triple bond. The term “partially unsaturated” is intended to encompass rings having multiple sites of unsaturation, but is not intended to include aryl or heteroaryl moieties, as herein defined.

[0189] Pharmaceutical composition: As used herein, the term “pharmaceutical composition” refers to an active agent, formulated together with one or more pharmaceutically acceptable carriers. In some embodiments, an active agent is present in unit dose amount appropriate for administration in a therapeutic regimen that shows a statistically significant probability of achieving a predetermined therapeutic effect when administered to a relevant population. In some embodiments, pharmaceutical compositions may be specially formulated for administration in solid or liquid form, including those adapted for the following: oral administration, for example, drenches (aqueous or non-aqueous solutions or suspensions), tablets, e.g., those targeted for buccal, sublingual, and systemic absorption, boluses, powders, granules, pastes for application to the tongue; parenteral administration, for example, by subcutaneous, intramuscular, intravenous or epidural injection as, for example, a sterile solution or suspension, or sustained-release formulation; topical application, for example, as a cream, ointment, or a controlled-release patch or spray applied to the skin, lungs, or oral cavity; intravaginally or intrarectally, for example, as a pessary, cream, or foam; sublingually; ocularly; transdermally; or nasally, pulmonary, and to other mucosal surfaces.

[0190] Pharmaceutically acceptable: As used herein, the phrase “pharmaceutically acceptable” refers to those compounds, materials, compositions and/or dosage forms which are, within the scope of sound medical judgment, suitable for use in contact with the tissues of human beings and animals without excessive toxicity, irritation, allergic response, or other problem or complication, commensurate with a reasonable benefit/risk ratio.

[0191] Pharmaceutically acceptable carrier: As used herein, the term “pharmaceutically acceptable carrier” means a pharmaceutically-acceptable material, composition or vehicle, such as a liquid or solid filler, diluent, excipient, or solvent encapsulating material, involved in carrying or transporting the subject compound from one organ, or portion of the body, to another organ, or portion of the body. Each carrier must be “acceptable” in the sense of being compatible with the other ingredients of the formulation and not injurious to the patient. Some examples of materials which can serve as pharmaceutically-acceptable carriers include: sugars, such as lactose, glucose and sucrose; starches, such as corn starch and potato starch; cellulose, and its derivatives, such as sodium carboxymethyl cellulose, ethyl cellulose and cellulose acetate; powdered tragacanth; malt; gelatin; talc; excipients, such as cocoa butter and suppository waxes; oils, such as peanut oil, cottonseed oil, safflower oil, sesame oil, olive oil, corn oil and soybean oil; glycols, such as propylene glycol; polyols, such as glycerin, sorbitol, mannitol and polyethylene glycol; esters, such as ethyl oleate and ethyl laurate; agar; buffering agents, such as magnesium hydroxide and aluminum hydroxide; alginic acid; pyrogen-free water; isotonic saline; Ringer's solution; ethyl alcohol; pH buffered solutions; polyesters, polycarbonates and/or polyanhydrides; and other non-toxic compatible substances employed in pharmaceutical formulations.

[0192] Pharmaceutically acceptable salt: The term “pharmaceutically acceptable salt”, as used herein, refers to salts of such compounds that are appropriate for use in pharmaceutical contexts, i.e., salts which are, within the scope of sound medical judgment, suitable for use in contact with the tissues of humans and lower animals without undue toxicity, irritation, allergic response and the like, and are commensurate with a reasonable benefit/risk ratio. Pharmaceutically acceptable salts are well known in the art. For example, S. M. Berge, et al. describes pharmaceutically acceptable salts in detail in J. Pharmaceutical Sciences, 66: 1-19 (1977). In some embodiments, pharmaceutically acceptable salt include, but are not limited to, nontoxic acid addition salts, which are salts of an amino group formed with inorganic acids such as hydrochloric acid, hydrobromic acid, phosphoric acid, sulfuric acid and perchloric acid or with organic acids such as acetic acid, maleic acid, tartaric acid, citric acid, succinic acid or malonic acid or by using other methods used in the art such as ion exchange. In some embodiments, pharmaceutically acceptable salts include, but are not limited to, adipate, alginate, ascorbate, aspartate, benzenesulfonate, benzoate, bisulfate, borate, butyrate, camphorate, camphorsulfonate, citrate, cyclopentanepropionate, digluconate, dodecylsulfate, ethanesulfonate, formate, fumarate, glucoheptonate, glycerophosphate, gluconate, hemisulfate, heptanoate, hexanoate, hydroiodide, 2-hydroxy-ethanesulfonate, lactobionate, lactate, laurate, lauryl sulfate, malate, maleate, malonate, methanesulfonate, 2-naphthalenesulfonate, nicotinate, nitrate, oleate, oxalate, palmitate, pamoate, pectinate, persulfate, 3-phenylpropionate, phosphate, picrate, pivalate, propionate, stearate, succinate, sulfate, tartrate, thiocyanate, p-toluenesulfonate, undecanoate, valerate salts, and the like. In some embodiments, a provided compound comprises one or more acidic groups, e.g., an oligonucleotide, and a pharmaceutically acceptable salt is an alkali, alkaline earth metal, or ammonium (e.g., an ammonium salt of N(R)₃, wherein each R is independently defined and described in the present disclosure) salt. Representative alkali or alkaline earth metal salts include sodium, lithium, potassium, calcium, magnesium, and the like. In some embodiments, a pharmaceutically acceptable salt is a sodium salt. In some embodiments, a pharmaceutically acceptable salt is a potassium salt. In some embodiments, a pharmaceutically acceptable salt is a calcium salt. In some embodiments, pharmaceutically acceptable salts include, when appropriate, nontoxic ammonium, quaternary ammonium, and amine cations formed using counterions such as halide, hydroxide, carboxylate, sulfate, phosphate, nitrate, alkyl having from 1 to 6 carbon atoms, sulfonate and aryl sulfonate. In some embodiments, a provided compound comprises more than one acid groups, for example, an oligonucleotide may comprise two or more acidic groups (e.g., in natural phosphate linkages and/or modified internucleotidic linkages). In some embodiments, a pharmaceutically acceptable salt, or generally a salt, of such a compound comprises two or more cations, which can be the same or different. In some embodiments, in a pharmaceutically acceptable salt (or generally, a salt), all ionizable hydrogen (e.g., in an aqueous solution with a pKa no more than about 11, 10, 9, 8, 7, 6, 5, 4, 3, or 2; in some embodiments, no more than about 7; in some embodiments, no more than about 6; in some embodiments, no more than about 5; in some embodiments, no more than about 4; in some embodiments, no more than about 3) in the acidic groups are replaced with cations. In some embodiments, each phosphorothioate and phosphate group independently exists in its salt form (e.g., if sodium salt, —O—P(O)(SNa)—O— and —O—P(O)(ONa)—O—, respectively). In some embodiments, each phosphorothioate and phosphate internucleotidic linkage independently exists in its salt form (e.g., if sodium salt, —O—P(O)(SNa)—O— and —O—P(O)(ONa)—O—, respectively). In some embodiments, a pharmaceutically acceptable salt is a sodium salt of an oligonucleotide. In some embodiments, a pharmaceutically acceptable salt is a sodium salt of an oligonucleotide, wherein each acidic phosphate and modified phosphate group (e.g., phosphorothioate, phosphate, etc.), if any, exists as a salt form (all sodium salt).

[0193] Protecting group: The term “protecting group,” as used herein, is well known in the art and includes those described in detail in Protecting Groups in Organic Synthesis, T. W. Greene and P. G. M. Wuts, 3^{rd} edition, John Wiley & Sons, 1999, the entirety of which is incorporated herein by reference. Also included are those protecting groups specially adapted for nucleoside and nucleotide chemistry described in Current Protocols in Nucleic Acid Chemistry, edited by Serge L. Beaucage et al. 06/2012, the entirety of Chapter 2 is incorporated herein by reference. Suitable amino-protecting groups include but are not limited to described herein and/or in: WO 2018/022473, WO 2018/098264, WO 2018/223056, WO 2018/223073, WO 2018/223081, WO 2018/237194, WO 2019/032607, WO 2019/055951, and/or WO 2019/075357, or U.S. Provisional patent applications 62/825,766 and 62/911,339, the description of the protecting groups of each of which is independently incorporated herein by reference.

[0194] Sample: As used herein, the term “sample” typically refers to an aliquot of material obtained or derived from a source of interest. In some embodiments, a source of interest is a biological or environmental source. In some embodiments, a source of interest may be or comprise a cell or an organism, such as a microbe, a plant, or an animal (e.g., a human). In some embodiments, a source of interest is or comprises biological tissue or fluid. In some embodiments, a biological tissue or fluid may be or comprise amniotic fluid, aqueous humor, ascites, bile, bone marrow, blood, breast milk, cerebrospinal fluid, cerumen, chyle, chime, ejaculate, endolymph, exudate, feces, gastric acid, gastric juice, lymph, mucus, pericardial fluid, perilymph, peritoneal fluid, pleural fluid, pus, rheum, saliva, sebum, semen, serum, smegma, sputum, synovial fluid, sweat, tears, urine, vaginal secreations, vitreous humour, vomit, and/or combinations or component(s) thereof. In some embodiments, a biological fluid may be or comprise an intracellular fluid, an extracellular fluid, an intravascular fluid (blood plasma), an interstitial fluid, a lymphatic fluid, and/or a transcellular fluid. In some embodiments, a biological fluid may be or comprise a plant exudate. In some embodiments, a biological tissue or sample may be obtained, for example, by aspirate, biopsy (e.g., fine needle or tissue biopsy), swab (e.g., oral, nasal, skin, or vaginal swab), scraping, surgery, washing or lavage (e.g., brocheoalvealar, ductal, nasal, ocular, oral, uterine, vaginal, or other washing or lavage). In some embodiments, a biological sample is or comprises cells obtained from an individual. In some embodiments, a sample is a “primary sample” obtained directly from a source of interest by any appropriate means. In some embodiments, as will be clear from context, the term “sample” refers to a preparation that is obtained by processing (e.g., by removing one or more components of and/or by adding one or more agents to) a primary sample. For example, filtering using a semi-permeable membrane. Such a “processed sample” may comprise, for example nucleic acids or proteins extracted from a sample or obtained by subjecting a primary sample to one or more techniques such as amplification or reverse transcription of nucleic acid, isolation and/or purification of certain components, etc.

[0195] Subject: As used herein, the term “subject” or “test subject” refers to any organism to which a provided compound (e.g., a provided oligonucleotide) or composition is administered in accordance with the present disclosure e.g., for experimental, diagnostic, prophylactic and/or therapeutic purposes. Typical subjects include animals (e.g., mammals such as mice, rats, rabbits, non-human primates, and humans; insects; worms; etc.) and plants. In some embodiments, a subject is a human. In some embodiments, a subject may be suffering from and/or susceptible to a disease, disorder and/or condition.

[0196] Substantially: As used herein, the term “substantially” refers to the qualitative condition of exhibiting total or near-total extent or degree of a characteristic or property of interest. A base sequence which is substantially complementary to a second sequence is not identical to the second sequence, but is mostly or nearly identical to the second sequence. In addition, one of ordinary skill in the biological and/or chemical arts will understand that biological and chemical phenomena rarely, if ever, go to completion and/or proceed to completeness or achieve or avoid an absolute result. The term “substantially” is therefore used herein to capture the potential lack of completeness inherent in many biological and/or chemical phenomena.

[0197] Sugar: The term “sugar” refers to a monosaccharide or polysaccharide in closed and/or open form. In some embodiments, sugars are monosaccharides. In some embodiments, sugars are polysaccharides. Sugars include, but are not limited to, ribose, deoxyribose, pentofuranose, pentopyranose, and hexopyranose moieties. As used herein, the term “sugar” also encompasses structural analogs used in lieu of conventional sugar molecules, such as glycol, polymer of which forms the backbone of the nucleic acid analog, glycol nucleic acid (“GNA”), etc. As used herein, the term “sugar” also encompasses structural analogs used in lieu of natural or naturally-occurring nucleotides, such as modified sugars and nucleotide sugars. In some embodiments, a sugar is a RNA or DNA sugar (ribose or deoxyribose). In some embodiments, a sugar is a modified ribose or deoxyribose sugar, e.g., 2′-modified, 5′-modified, etc. As described herein, in some embodiments, when used in oligonucleotides and/or nucleic acids, modified sugars may provide one or more desired properties, activities, etc. In some embodiments, a sugar is optionally substituted ribose or deoxyribose. In some embodiments, a “sugar” refers to a sugar unit in an oligonucleotide or a nucleic acid.

[0198] Susceptible to: An individual who is “susceptible to” a disease, disorder and/or condition is one who has a higher risk of developing the disease, disorder and/or condition than does a member of the general public. In some embodiments, an individual who is susceptible to a disease, disorder and/or condition is predisposed to have that disease, disorder and/or condition. In some embodiments, an individual who is susceptible to a disease, disorder and/or condition may not have been diagnosed with the disease, disorder and/or condition. In some embodiments, an individual who is susceptible to a disease, disorder and/or condition may exhibit symptoms of the disease, disorder and/or condition. In some embodiments, an individual who is susceptible to a disease, disorder and/or condition may not exhibit symptoms of the disease, disorder and/or condition. In some embodiments, an individual who is susceptible to a disease, disorder, and/or condition will develop the disease, disorder, and/or condition. In some embodiments, an individual who is susceptible to a disease, disorder, and/or condition will not develop the disease, disorder, and/or condition.

[0199] Therapeutic agent: As used herein, the term “therapeutic agent” in general refers to any agent that elicits a desired effect (e.g., a desired biological, clinical, or pharmacological effect) when administered to a subject. In some embodiments, an agent is considered to be a therapeutic agent if it demonstrates a statistically significant effect across an appropriate population. In some embodiments, an appropriate population is a population of subjects suffering from and/or susceptible to a disease, disorder or condition. In some embodiments, an appropriate population is a population of model organisms. In some embodiments, an appropriate population may be defined by one or more criterion such as age group, gender, genetic background, preexisting clinical conditions, prior exposure to therapy. In some embodiments, a therapeutic agent is a substance that alleviates, ameliorates, relieves, inhibits, prevents, delays onset of, reduces severity of, and/or reduces incidence of one or more symptoms or features of a disease, disorder, and/or condition in a subject when administered to the subject in an effective amount. In some embodiments, a “therapeutic agent” is an agent that has been or is required to be approved by a government agency before it can be marketed for administration to humans. In some embodiments, a “therapeutic agent” is an agent for which a medical prescription is required for administration to humans. In some embodiments, a therapeutic agent is a provided compound, e.g., a provided oligonucleotide.

[0200] Therapeutically effective amount: As used herein, the term “therapeutically effective amount” means an amount of a substance (e.g., a therapeutic agent, composition, and/or formulation) that elicits a desired biological response when administered as part of a therapeutic regimen. In some embodiments, a therapeutically effective amount of a substance is an amount that is sufficient, when administered to a subject suffering from or susceptible to a disease, disorder, and/or condition, to treat, diagnose, prevent, and/or delay the onset of the disease, disorder, and/or condition. As will be appreciated by those of ordinary skill in this art, the effective amount of a substance may vary depending on such factors as the desired biological endpoint, the substance to be delivered, the target cell or tissue, etc. For example, the effective amount of compound in a formulation to treat a disease, disorder, and/or condition is the amount that alleviates, ameliorates, relieves, inhibits, prevents, delays onset of, reduces severity of and/or reduces incidence of one or more symptoms or features of the disease, disorder, and/or condition. In some embodiments, a therapeutically effective amount is administered in a single dose; in some embodiments, multiple unit doses are required to deliver a therapeutically effective amount.

[0201] Treat: As used herein, the term “treat,” “treatment,” or “treating” refers to any method used to partially or completely alleviate, ameliorate, relieve, inhibit, prevent, delay onset of, reduce severity of, and/or reduce incidence of one or more symptoms or features of a disease, disorder, and/or condition. Treatment may be administered to a subject who does not exhibit signs of a disease, disorder, and/or condition. In some embodiments, treatment may be administered to a subject who exhibits only early signs of the disease, disorder, and/or condition, for example for the purpose of decreasing the risk of developing pathology associated with the disease, disorder, and/or condition.

[0202] Unsaturated: The term “unsaturated,” as used herein, means that a moiety has one or more units of unsaturation.

[0203] Wild-type: As used herein, the term “wild-type” has its art-understood meaning that refers to an entity having a structure and/or activity as found in nature in a “normal” (as contrasted with mutant, diseased, altered, etc.) state or context. Those of ordinary skill in the art will appreciate that wild type genes and polypeptides often exist in multiple different forms (e.g., alleles).

[0204] As those skilled in the art will appreciate, methods and compositions described herein relating to provided compounds (e.g., ds oligonucleotides) generally also apply to pharmaceutically acceptable salts of such compounds.

### DESCRIPTION OF CERTAIN EMBODIMENTS

[0205] Double stranded oligonucleotides are useful tools for a wide variety of applications. For example, ds oligonucleotides targeting HSD17B13 (e.g., NCBI Gene ID: 345275 for human HSD17B13 and related sequences from other organisms) from are useful in therapeutic, diagnostic, and research applications, including the treatment of a variety of HSD17B13-associated conditions, disorders, and diseases, including but not limited to NAFLD, NASH, ASH, alcoholic liver disease, nonalcoholic liver disease, alcoholic cirrhosis, nonalcoholic cirrhosis, steatohepatitis, hepatic steatosis, hepatoceullar carcinoma, HCV hepatitis, chronic hepatitis, hereditary hemochromatosis, primary sclerosing cholangitis, drug induced liver injury, or hepatocellular necrosis. The use of naturally occurring nucleic acids (e.g., unmodified DNA or RNA) is limited, for example, by their susceptibility to endo- and exo-nucleases. As such, various synthetic counterparts have been developed to circumvent these shortcomings and/or to further improve various properties and activities. These include synthetic oligonucleotides that contain chemical modifications, e.g., base modifications, sugar modifications, backbone modifications, etc., which, among other things, render these molecules less susceptible to degradation and improve other properties and/or activities. From a structural point of view, modifications to internucleotidic linkages can introduce chirality and/or alter charge, and certain properties may be affected by configurations of linkage phosphorus atoms of oligonucleotides. For example, binding affinity, sequence specific binding to complementary RNA, stability against nucleases, cleavage of target nucleic acids, delivery, pharmacokinetics, etc., can be affected by, inter alia, chirality and/or charge of backbone linkage atoms.

[0206] In some embodiments, a ds oligonucleotide targeting HSD17B13 comprises one or more of:
[0207] (1) a guide strand comprising backbone phosphorothioate chiral centers in Sp configuration between the 3′ terminal nucleotide and the penultimate (N-1) nucleotide and as between the penultimate (N-1) nucleotide and the immediately upstream, i.e., in the 5′ direction, (N-2) nucleotide;
[0208] (2) a guide strand comprising backbone phosphorothioate chiral centers in Rp, Sp, or alternating configurations between the 5′ terminal (+1) nucleotide and the immediately downstream, i.e., in the 3′ direction, (+2) nucleotide and between the +2 nucleotide and the immediately downstream (+3) nucleotide;
[0209] (3) a guide strand comprising one or more backbone phosphorothioate chiral centers upstream, i.e., in the 5′ direction, relative to backbone phosphorothioate chiral centers in Sp configuration between the 3′ terminal nucleotide and the penultimate (N-1) nucleotide and as between the penultimate (N-1) nucleotide and the immediately upstream (N-2) nucleotide, where the upstream backbone phosphorothioate chiral centers are in Rp or Sp configuration;
[0210] (4) a guide strand comprising one or more backbone phosphorothioate chiral centers in Rp or Sp configuration between the 5′ terminal (+1) nucleotide and the immediately downstream (+2) nucleotide and between the +2 nucleotide and the immediately downstream (+3) nucleotide, as well as between one or both of: (a) the +3 nucleotide and the +4 nucleotide; and (b) the +5 nucleotide and the +6 nucleotide;
[0211] (5) a passenger strand in combination with one or more of the aforementioned guide strands, comprising one or more backbone chiral centers in Rp or Sp configuration; and
[0212] 6) a passenger strand in combination with one or more of the aforementioned guide strands, comprising backbone phosphorothioate chiral centers in the Sp configuration between the 5′ terminal (+1) nucleotide and the immediately downstream, i.e., in the 3′ direction, (+2) nucleotide and between the 3′ terminal nucleotide and the penultimate (N-1) nucleotide;
   wherein the ds oligonucleotide further comprises one or more of:
[0213] (1) a guide strand where one or both of the 5′ and 3′ terminal dinucleotides are not linked by non-negatively charged internucleotidic linkages, i.e., the guide strand comprises one more non-negatively charged internucleotidic linkages downstream, i.e., in the 3′ direction, relative to the linkage between the 5′ terminal dinucleotide and/or upstream, i.e., in the 5′ direction, relative to the linkage between the 3′ terminal dinucleotide;
[0214] (2) a guide strand where one or more Rp, Sp, or stereorandom non-negatively charged internucleotidic linkage occurs between any two adjacent nucleotides between the second (+2) nucleotide relative to the 5′ terminal nucleotide of the guide strand and the penultimate 3′ (N-1) nucleotide of the guide strand, where N is the 3′ terminal nucleotide;
[0215] (3) a guide strand where an Rp, Sp, or stereorandom non-negatively charged internucleotidic linkage occurs between the third (+3) and fourth (+4) nucleotides, relative to the 5′ terminal nucleotide, of the guide strand and/or between the tenth (+10) and eleventh (+11) nucleotides, relative to the 5′ terminal nucleotide;
[0216] (4) a passenger strand where one or more Rp, Sp, or stereorandom non-negatively charged internucleotidic linkage occurs upstream, i.e., in the 5′ direction, relative to the central nucleotide of the passenger strand; and
[0217] (5) Passenger strand where one or more Rp, Sp, or stereorandom non-negatively charged internucleotidic linkage occurs downstream, i.e., in the 3′ direction, relative to the central nucleotide of the passenger strand, and
   wherein the ds oligonucleotide further comprises a 2′ modification, e.g., a 2′ F modification, of the 3′ nucleotide of a nucleotide pair linked by an Rp, Sp, or stereorandom non-negatively charged internucleotidic linkage. In certain embodiments, the one or more Rp, Sp, or stereorandom non-negatively charged internucleotidic linkage incorporated into the guide or passenger strand is an Rp non-negatively charged internucleotidic linkage. In certain embodiments, the one or more Rp, Sp, or stereorandom non-negatively charged internucleotidic linkage is an Sp non-negatively charged internucleotidic linkage. In certain embodiments, the one or more Rp, Sp, or stereorandom non-negatively charged internucleotidic linkage is a stereorandom non-negatively charged internucleotidic linkage.

[0218] In some embodiments, a ds oligonucleotide targeting HSD17B13 comprises: (1) a phosphorothioate chiral center in Rp or Sp configuration; (2) an Rp, Sp, or stereorandom non-negatively charged internucleotidic linkage where the 3′ nucleotide of a nucleotide pair linked by an Rp, Sp, or stereorandom non-negatively charged internucleotidic linkage comprises a 2′ modification, e.g., a 2′ F; and (3) a 5′ terminal modification selected from:
[0219] (a) 5′ PO modifications, such as, but not limited to:

[chemical structure]

[0220] (b) 5′ VP modifications, such as, but not limited to:

[chemical structure]

[0221] (c) 5′ MeP modifications, such as, but not limited to:

[chemical structure]

[0222] (d) 5′ PN and 5′ Trizole-P modifications, such as, but not limited to:

[chemical structure]

wherein Base is selected from A, C, G, T, U, abasic and modified nucleobases;
R^{2′} is selected from H, OH, O-alkyl, F, MOE, locked nucleic acid (LNA) bridges and bridged nucleic acid (BNA) bridges to the 4′ C, such as, but not limited to:

[chemical structure]

[0223] In certain embodiments, the one or more Rp, Sp, or stereorandom non-negatively charged internucleotidic linkage incorporated into the guide strand is an Rp non-negatively charged internucleotidic linkage. In certain embodiments, the one or more Rp, Sp, or stereorandom non-negatively charged internucleotidic linkage is an Sp non-negatively charged internucleotidic linkage. In certain embodiments, the one or more Rp, Sp, or stereorandom non-negatively charged internucleotidic linkage is a stereorandom non-negatively charged internucleotidic linkage.

[0224] In some embodiments, a ds oligonucleotide targeting HSD17B13 comprises: (1) a phosphorothioate chiral center in Rp or Sp configuration; (2) an Rp, Sp, or stereorandom non-negatively charged internucleotidic linkage where the 3′ nucleotide of a nucleotide pair linked by an Rp, Sp, or stereorandom non-negatively charged internucleotidic linkage comprises a 2′ modification, e.g., a 2′ F; and (3) a 5′ terminal modification selected from:
[0225] (a) 5′ PO nucleotides, such as, but not limited to:

[chemical structure]

[0226] (b) 5′ VP nucleotides, such as, but not limited to:

[chemical structure]

[0227] (c) 5′ MeP nucleotides, such as, but not limited to:

[chemical structure]

[0228] (d) 5′ PN and 5′ Trizole-P nucleotides, such as, but not limited to:

[chemical structure]

[0229] (e) 5′ abasic VP and 5′ abasic MeP nucleotides, such as, but not limited to:

[chemical structure]

[0230] In certain embodiments, the one or more Rp, Sp, or stereorandom non-negatively charged internucleotidic linkage incorporated into the guide strand is an Rp non-negatively charged internucleotidic linkage. In certain embodiments, the one or more Rp, Sp, or stereorandom non-negatively charged internucleotidic linkage is an Sp non-negatively charged internucleotidic linkage. In certain embodiments, the one or more Rp, Sp, or stereorandom non-negatively charged internucleotidic linkage is a stereorandom non-negatively charged internucleotidic linkage.

[0231] In some embodiments, a ds oligonucleotide targeting HSD17B13 comprises one or more of:
[0232] (1) a guide strand comprising backbone phosphorothioate chiral centers in Sp configuration between the 3′ terminal nucleotide and the penultimate (N-1) nucleotide and as between the penultimate (N-1) nucleotide and the immediately upstream, i.e., in the 5′ direction, (N-2) nucleotide;
[0233] (2) a guide strand comprising backbone phosphorothioate chiral centers in Rp, Sp, or alternating configurations between the 5′ terminal (+1) nucleotide and the immediately downstream, i.e., in the 3′ direction, (+2) nucleotide and between the +2 nucleotide and the immediately downstream (+3) nucleotide;
[0234] (3) a guide strand comprising one or more backbone phosphorothioate chiral centers upstream, i.e., in the 5′ direction, relative to backbone phosphorothioate chiral centers in Sp configuration between the 3′ terminal nucleotide and the penultimate (N-1) nucleotide and as between the penultimate (N-1) nucleotide and the immediately upstream (N-2) nucleotide, where the upstream backbone phosphorothioate chiral centers are in Rp or Sp configuration;
[0235] (4) a guide strand comprising one or more backbone phosphorothioate chiral centers in Rp or Sp configuration between the 5′ terminal (+1) nucleotide and the immediately downstream (+2) nucleotide and between the +2 nucleotide and the immediately downstream (+3) nucleotide, as well as between one or both of: (a) the +3 nucleotide and the +4 nucleotide; and (b) the +5 nucleotide and the +6 nucleotide;
[0236] (5) a passenger strand in combination with one or more of the aforementioned guide strands, comprising one or more backbone chiral centers in Rp or Sp configuration; and
[0237] 6) a passenger strand in combination with one or more of the aforementioned guide strands, comprising backbone phosphorothioate chiral centers in the Sp configuration between the 5′ terminal (+1) nucleotide and the immediately downstream, i.e., in the 3′ direction, (+2) nucleotide and between the 3′ terminal nucleotide and the penultimate (N-1) nucleotide;
   wherein the ds oligonucleotide further comprises one or more of:
[0238] (1) a guide strand where one or both of the 5′ and 3′ terminal dinucleotides are not linked by non-negatively charged internucleotidic linkages, i.e., the guide strand comprises one more non-negatively charged internucleotidic linkages downstream, i.e., in the 3′ direction, relative to the linkage between the 5′ terminal dinucleotide and/or upstream, i.e., in the 5′ direction, relative to the linkage between the 3′ terminal dinucleotide;
[0239] (2) a guide strand where one or more Rp, Sp, or stereorandom non-negatively charged internucleotidic linkage occurs between any two adjacent nucleotides between the second (+2) nucleotide relative to the 5′ terminal nucleotide of the guide strand and the penultimate 3′ (N-1) nucleotide of the guide strand, where N is the 3′ terminal nucleotide;
[0240] (3) a guide strand where an Rp, Sp, or stereorandom non-negatively charged internucleotidic linkage occurs between the third (+3) and fourth (+4) nucleotides, relative to the 5′ terminal nucleotide, of the guide strand and/or between the tenth (+10) and eleventh (+11) nucleotides, relative to the 5′ terminal nucleotide;
[0241] (4) a passenger strand where one or more Rp, Sp, or stereorandom non-negatively charged internucleotidic linkage occurs upstream, i.e., in the 5′ direction, relative to the central nucleotide of the passenger strand;
[0242] (5) Passenger strand where one or more Rp, Sp, or stereorandom non-negatively charged internucleotidic linkage occurs downstream, i.e., in the 3′ direction, relative to the central nucleotide of the passenger strand, and
[0243] wherein the ds oligonucleotide further comprises a 2′ modification, e.g., a 2′ F modification, of the 3′ nucleotide of a nucleotide pair linked by an Rp, Sp, or stereorandom non-negatively charged internucleotidic linkage. In certain embodiments, the one or more Rp, Sp, or stereorandom non-negatively charged internucleotidic linkage incorporated into the guide or passenger strand is an Rp non-negatively charged internucleotidic linkage. In certain embodiments, the one or more Rp, Sp, or stereorandom non-negatively charged internucleotidic linkage is an Sp non-negatively charged internucleotidic linkage. In certain embodiments, the one or more Rp, Sp, or stereorandom non-negatively charged internucleotidic linkage is a stereorandom non-negatively charged internucleotidic linkage.

[0244] In some embodiments, a ds oligonucleotide targeting HSD17B13 comprises non-naturally occurring internucleotidic linkages, e.g., neutral internucleotidic linkages, which can, in certain embodiments, be used to link one or more molecules to the double-stranded oligonucleotides described herein. In certain embodiments, such linked molecules can facilitate targeting and/or delivery of the double-stranded oligonucleotide. For example, but not limitation, such linked molecules an include lipophilic molecules. In certain embodiments, the linked molecule is a molecule comprising one or more GalNac moieties. In certain embodiments, the linked molecule is a receptor. In certain embodiments, the linked molecule is a receptor ligand.

[0245] In certain embodiments, the present disclosure provides technologies (e.g., compounds, methods, etc.) for improving oligonucleotide stability while maintaining or increasing activity, including compositions of improved-stability oligonucleotides.

[0246] In certain embodiments, the present disclosure provides technologies for incorporating various additional chemical moieties into ds oligonucleotides. In certain embodiments, the present disclosure provides, for example, reagents and methods for introducing additional chemical moieties through nucleobases (e.g., by covalent linkage, optionally via a linker, to a site on a nucleobase).

[0247] In certain embodiments, the present disclosure provides technologies, e.g., ds oligonucleotide compositions and methods thereof, that achieve allele-specific suppression, wherein transcripts from one allele of a particular target gene is selectively knocked down relative to at least one other allele of the same gene.

[0248] Among other things, the present disclosure provides structural elements, technologies and/or features that can be incorporated into ds oligonucleotides and can impart or tune one or more properties thereof (e.g., relative to an otherwise identical ds oligonucleotide lacking the relevant technology or feature). In certain embodiments, the present disclosure documents that one or more provided technologies and/or features can usefully be incorporated into ds oligonucleotides of various sequences.

[0249] In certain embodiments, the present disclosure demonstrates that certain provided structural elements, technologies and/or features are particularly useful for ds oligonucleotides that participate in and/or direct RNAi mechanisms (e.g., RNAi agents). Regardless, however, the teachings of the present disclosure are not limited to ds oligonucleotides that participate in or operate via any particular mechanism.

[0250] In certain embodiments, the present disclosure pertains to any ds oligonucleotide, useful for any purpose, which operates through any mechanism, and which comprises any sequence, structure or format (or portion thereof) described herein.

[0251] In some embodiments, a ds oligonucleotide targeting HSD17B13 comprises backbone phosphorothioate chiral centers in Sp configuration between the 3′ terminal nucleotide and the penultimate (N-1) nucleotide and as between the penultimate (N-1) nucleotide and the immediately upstream (N-2) nucleotide, and one or more of:
[0252] (1) a guide strand where one or both of the 5′ and 3′ terminal dinucleotides are not linked by non-negatively charged internucleotidic linkages, i.e., the guide strand comprises one more non-negatively charged internucleotidic linkages downstream, i.e., in the 3′ direction, relative to the linkage between the 5′ terminal dinucleotide and/or upstream, i.e., in the 5′ direction, relative to the linkage between the 3′ terminal dinucleotide;
[0253] (2) a guide strand where one or more Rp, Sp, or stereorandom non-negatively charged internucleotidic linkage occurs between any two adjacent nucleotides between the second (+2) nucleotide relative to the 5′ terminal nucleotide of the guide strand and the penultimate 3′ (N-1) nucleotide of the guide strand, where N is the 3′ terminal nucleotide;
[0254] (3) a guide strand where an Rp, Sp, or stereorandom non-negatively charged internucleotidic linkage occurs between the third (+3) and fourth (+4) nucleotides, relative to the 5′ terminal nucleotide, of the guide strand and/or between the tenth (+10) and eleventh (+11) nucleotides, relative to the 5′ terminal nucleotide;
[0255] (4) a passenger strand where one or more Rp, Sp, or stereorandom non-negatively charged internucleotidic linkage occurs upstream, i.e., in the 5′ direction, relative to the central nucleotide of the passenger strand; and
[0256] (5) Passenger strand where one or more Rp, Sp, or stereorandom non-negatively charged internucleotidic linkage occurs downstream, i.e., in the 3′ direction, relative to the central nucleotide of the passenger strand, and
   wherein the ds oligonucleotide further comprises a 2′ modification, e.g., a 2′ F modification, of the 3′ nucleotide of a nucleotide pair linked by an Rp, Sp, or stereorandom non-negatively charged internucleotidic linkage, and the passenger strand comprises 0-n Rp, Sp, or stereorandom non-negatively charged internucleotidic linkages, where n is about 1 to 49. In certain embodiments, the one or more Rp, Sp, or stereorandom non-negatively charged internucleotidic linkage incorporated into the guide or passenger strand is an Rp non-negatively charged internucleotidic linkage. In certain embodiments, the one or more Rp, Sp, or stereorandom non-negatively charged internucleotidic linkage is an Sp non-negatively charged internucleotidic linkage. In certain embodiments, the one or more Rp, Sp, or stereorandom non-negatively charged internucleotidic linkage is a stereorandom non-negatively charged internucleotidic linkage.

[0257] In some embodiments, a ds oligonucleotide targeting HSD17B13 comprises backbone phosphorothioate chiral centers in Rp, Sp, or alternating configurations between the 5′ terminal (+1) nucleotide and the immediately downstream (+2) nucleotide and between the +2 nucleotide and the immediately downstream (+3) nucleotide, and one or more of:
[0258] (1) a guide strand where one or both of the 5′ and 3′ terminal dinucleotides are not linked by non-negatively charged internucleotidic linkages, i.e., the guide strand comprises one more non-negatively charged internucleotidic linkages downstream, i.e., in the 3′ direction, relative to the linkage between the 5′ terminal dinucleotide and/or upstream, i.e., in the 5′ direction, relative to the linkage between the 3′ terminal dinucleotide;
[0259] (2) a guide strand where one or more Rp, Sp, or stereorandom non-negatively charged internucleotidic linkage occurs between any two adjacent nucleotides between the second (+2) nucleotide relative to the 5′ terminal nucleotide of the guide strand and the penultimate 3′ (N-1) nucleotide of the guide strand, where N is the 3′ terminal nucleotide;
[0260] (3) a guide strand where an Rp, Sp, or stereorandom non-negatively charged internucleotidic linkage occurs between the third (+3) and fourth (+4) nucleotides, relative to the 5′ terminal nucleotide, of the guide strand and/or between the tenth (+10) and eleventh (+11) nucleotides, relative to the 5′ terminal nucleotide;
[0261] (4) a passenger strand where one or more Rp, Sp, or stereorandom non-negatively charged internucleotidic linkage occurs upstream, i.e., in the 5′ direction, relative to the central nucleotide of the passenger strand; and
[0262] (5) Passenger strand where one or more Rp, Sp, or stereorandom non-negatively charged internucleotidic linkage occurs downstream, i.e., in the 3′ direction, relative to the central nucleotide of the passenger strand, and
   wherein the ds oligonucleotide further comprises a 2′ modification, e.g., a 2′ F modification, of the 3′ nucleotide of a nucleotide pair linked by an Rp, Sp, or stereorandom non-negatively charged internucleotidic linkage, and the passenger strand comprises 0-n Rp, Sp, or stereorandom non-negatively charged internucleotidic linkages, where n is about 1 to 49. In certain embodiments, the one or more Rp, Sp, or stereorandom non-negatively charged internucleotidic linkage incorporated into the guide or passenger strand is an Rp non-negatively charged internucleotidic linkage. In certain embodiments, the one or more Rp, Sp, or stereorandom non-negatively charged internucleotidic linkage is an Sp non-negatively charged internucleotidic linkage. In certain embodiments, the one or more Rp, Sp, or stereorandom non-negatively charged internucleotidic linkage is a stereorandom non-negatively charged internucleotidic linkage.

[0263] In some embodiments, the present disclosure provides a ds oligonucleotide targeting HSD17B13 comprising one or more backbone phosphorothioate chiral centers in Rp or Sp configuration upstream of backbone phosphorothioate chiral centers in Sp configuration between the 3′ terminal nucleotide and the penultimate (N-1) nucleotide and as between the penultimate (N-1) nucleotide and the immediately upstream (N-2) nucleotide, and one or more of:
[0264] (1) a guide strand where one or both of the 5′ and 3′ terminal dinucleotides are not linked by non-negatively charged internucleotidic linkages, i.e., the guide strand comprises one more non-negatively charged internucleotidic linkages downstream, i.e., in the 3′ direction, relative to the linkage between the 5′ terminal dinucleotide and/or upstream, i.e., in the 5′ direction, relative to the linkage between the 3′ terminal dinucleotide;
[0265] (2) a guide strand where one or more Rp, Sp, or stereorandom non-negatively charged internucleotidic linkage occurs between any two adjacent nucleotides between the second (+2) nucleotide relative to the 5′ terminal nucleotide of the guide strand and the penultimate 3′ (N-1) nucleotide of the guide strand, where N is the 3′ terminal nucleotide;
[0266] (3) a guide strand where an Rp, Sp, or stereorandom non-negatively charged internucleotidic linkage occurs between the third (+3) and fourth (+4) nucleotides, relative to the 5′ terminal nucleotide, of the guide strand and/or between the tenth (+10) and eleventh (+11) nucleotides, relative to the 5′ terminal nucleotide;
[0267] (4) a passenger strand where one or more Rp, Sp, or stereorandom non-negatively charged internucleotidic linkage occurs upstream, i.e., in the 5′ direction, relative to the central nucleotide of the passenger strand; and
[0268] (5) Passenger strand where one or more Rp, Sp, or stereorandom non-negatively charged internucleotidic linkage occurs downstream, i.e., in the 3′ direction, relative to the central nucleotide of the passenger strand, and
   wherein the ds oligonucleotide further comprises a 2′ modification, e.g., a 2′ F modification, of the 3′ nucleotide of a nucleotide pair linked by an Rp, Sp, or stereorandom non-negatively charged internucleotidic linkage, and the passenger strand comprises 0-n Rp, Sp, or stereorandom non-negatively charged internucleotidic linkages, where n is about 1 to 49. In certain embodiments, the one or more Rp, Sp, or stereorandom non-negatively charged internucleotidic linkage incorporated into the guide or passenger strand is an Rp non-negatively charged internucleotidic linkage. In certain embodiments, the one or more Rp, Sp, or stereorandom non-negatively charged internucleotidic linkage is an Sp non-negatively charged internucleotidic linkage. In certain embodiments, the one or more Rp, Sp, or stereorandom non-negatively charged internucleotidic linkage is a stereorandom non-negatively charged internucleotidic linkage.

[0269] In some embodiments, the guide strand comprises one or more Rp, Sp, or stereorandom non-negatively charged internucleotidic linkage occurs between the second (+2) and third (+3) nucleotides, relative to the 5′ terminal nucleotide, of the guide strand and the internucleotidic linkage to the penultimate 3′ (N-1) nucleotide, and one or more of:
[0270] (1) a guide strand where one or both of the 5′ and 3′ terminal dinucleotides are not linked by non-negatively charged internucleotidic linkages, i.e., the guide strand comprises one more non-negatively charged internucleotidic linkages downstream, i.e., in the 3′ direction, relative to the linkage between the 5′ terminal dinucleotide and/or upstream, i.e., in the 5′ direction, relative to the linkage between the 3′ terminal dinucleotide;
[0271] (2) a guide strand where one or more Rp, Sp, or stereorandom non-negatively charged internucleotidic linkage occurs between any two adjacent nucleotides between the second (+2) nucleotide relative to the 5′ terminal nucleotide of the guide strand and the penultimate 3′ (N-1) nucleotide of the guide strand, where N is the 3′ terminal nucleotide;
[0272] (3) a guide strand where an Rp, Sp, or stereorandom non-negatively charged internucleotidic linkage occurs between the third (+3) and fourth (+4) nucleotides, relative to the 5′ terminal nucleotide, of the guide strand and/or between the tenth (+10) and eleventh (+11) nucleotides, relative to the 5′ terminal nucleotide;
[0273] (4) a passenger strand where one or more Rp, Sp, or stereorandom non-negatively charged internucleotidic linkage occurs upstream, i.e., in the 5′ direction, relative to the central nucleotide of the passenger strand; and
[0274] (5) Passenger strand where one or more Rp, Sp, or stereorandom non-negatively charged internucleotidic linkage occurs downstream, i.e., in the 3′ direction, relative to the central nucleotide of the passenger strand, and
   wherein the ds oligonucleotide further comprises a 2′ modification, e.g., a 2′ F modification, of the 3′ nucleotide of a nucleotide pair linked by an Rp, Sp, or stereorandom non-negatively charged internucleotidic linkage, and the passenger strand comprises 0-n Rp, Sp, or stereorandom non-negatively charged internucleotidic linkages, where n is about 1 to 49. In certain embodiments, the one or more Rp, Sp, or stereorandom non-negatively charged internucleotidic linkage incorporated into the guide or passenger strand is an Rp non-negatively charged internucleotidic linkage. In certain embodiments, the one or more Rp, Sp, or stereorandom non-negatively charged internucleotidic linkage is an Sp non-negatively charged internucleotidic linkage. In certain embodiments, the one or more Rp, Sp, or stereorandom non-negatively charged internucleotidic linkage is a stereorandom non-negatively charged internucleotidic linkage.

[0275] In some embodiments, the guide strand comprises backbone phosphorothioate chiral centers in Sp configuration between the 3′ terminal nucleotide and the penultimate (N-1) nucleotide and as between the penultimate (N-1) nucleotide and the immediately upstream (N-2) nucleotide, and one or more of:
[0276] (1) a guide strand where one or both of the 5′ and 3′ terminal dinucleotides are not linked by non-negatively charged internucleotidic linkages, i.e., the guide strand comprises one more non-negatively charged internucleotidic linkages downstream, i.e., in the 3′ direction, relative to the linkage between the 5′ terminal dinucleotide and/or upstream, i.e., in the 5′ direction, relative to the linkage between the 3′ terminal dinucleotide;
[0277] (2) a guide strand where one or more Rp, Sp, or stereorandom non-negatively charged internucleotidic linkage occurs between any two adjacent nucleotides between the second (+2) nucleotide relative to the 5′ terminal nucleotide of the guide strand and the penultimate 3′ (N-1) nucleotide of the guide strand, where N is the 3′ terminal nucleotide;
[0278] (3) a guide strand where an Rp, Sp, or stereorandom non-negatively charged internucleotidic linkage occurs between the third (+3) and fourth (+4) nucleotides, relative to the 5′ terminal nucleotide, of the guide strand and/or between the tenth (+10) and eleventh (+11) nucleotides, relative to the 5′ terminal nucleotide;
[0279] (4) a passenger strand where one or more Rp, Sp, or stereorandom non-negatively charged internucleotidic linkage occurs upstream, i.e., in the 5′ direction, relative to the central nucleotide of the passenger strand; and
[0280] (5) Passenger strand where one or more Rp, Sp, or stereorandom non-negatively charged internucleotidic linkage occurs downstream, i.e., in the 3′ direction, relative to the central nucleotide of the passenger strand, and
   wherein the ds oligonucleotide further comprises a 2′ modification, e.g., a 2′ F modification, of the 3′ nucleotide of a nucleotide pair linked by an Rp, Sp, or stereorandom non-negatively charged internucleotidic linkage, and the passenger strand comprises one or more backbone phosphorothioate chiral centers in Rp or Sp configuration. In certain embodiments, the one or more Rp, Sp, or stereorandom non-negatively charged internucleotidic linkage incorporated into the guide or passenger strand is an Rp non-negatively charged internucleotidic linkage. In certain embodiments, the one or more Rp, Sp, or stereorandom non-negatively charged internucleotidic linkage is an Sp non-negatively charged internucleotidic linkage. In certain embodiments, the one or more Rp, Sp, or stereorandom non-negatively charged internucleotidic linkage is a stereorandom non-negatively charged internucleotidic linkage.

[0281] In some embodiments, the guide strand comprises backbone phosphorothioate chiral centers in Rp, Sp, or alternating configurations between the 5′ terminal (+1) nucleotide and the immediately downstream (+2) nucleotide and between the +2 nucleotide and the immediately downstream (+3) nucleotide, and one or more of:
[0282] (1) a guide strand where one or both of the 5′ and 3′ terminal dinucleotides are not linked by non-negatively charged internucleotidic linkages, i.e., the guide strand comprises one more non-negatively charged internucleotidic linkages downstream, i.e., in the 3′ direction, relative to the linkage between the 5′ terminal dinucleotide and/or upstream, i.e., in the 5′ direction, relative to the linkage between the 3′ terminal dinucleotide;
[0283] (2) a guide strand where one or more Rp, Sp, or stereorandom non-negatively charged internucleotidic linkage occurs between any two adjacent nucleotides between the second (+2) nucleotide relative to the 5′ terminal nucleotide of the guide strand and the penultimate 3′ (N-1) nucleotide of the guide strand, where N is the 3′ terminal nucleotide;
[0284] (3) a guide strand where an Rp, Sp, or stereorandom non-negatively charged internucleotidic linkage occurs between the third (+3) and fourth (+4) nucleotides, relative to the 5′ terminal nucleotide, of the guide strand and/or between the tenth (+10) and eleventh (+11) nucleotides, relative to the 5′ terminal nucleotide;
[0285] (4) a passenger strand where one or more Rp, Sp, or stereorandom non-negatively charged internucleotidic linkage occurs upstream, i.e., in the 5′ direction, relative to the central nucleotide of the passenger strand; and
[0286] (5) Passenger strand where one or more Rp, Sp, or stereorandom non-negatively charged internucleotidic linkage occurs downstream, i.e., in the 3′ direction, relative to the central nucleotide of the passenger strand, and
   wherein the ds oligonucleotide further comprises a 2′ modification, e.g., a 2′ F modification, of the 3′ nucleotide of a nucleotide pair linked by an Rp, Sp, or stereorandom non-negatively charged internucleotidic linkage, and the passenger strand comprises one or more backbone chiral centers in Rp or Sp configuration. In certain embodiments, the one or more Rp, Sp, or stereorandom non-negatively charged internucleotidic linkage incorporated into the guide or passenger strand is an Rp non-negatively charged internucleotidic linkage. In certain embodiments, the one or more Rp, Sp, or stereorandom non-negatively charged internucleotidic linkage is an Sp non-negatively charged internucleotidic linkage. In certain embodiments, the one or more Rp, Sp, or stereorandom non-negatively charged internucleotidic linkage is a stereorandom non-negatively charged internucleotidic linkage. In certain of the embodiments disclosed herein, the backbone phosphorothioate chiral centers are in Rp configurations between the 5′ terminal (+1) nucleotide and the immediately downstream (+2) nucleotide and between the +2 nucleotide and the immediately downstream (+3) nucleotide. In certain embodiments described herein, the backbone phosphorothioate chiral centers are in Sp configurations between the 5′ terminal (+1) nucleotide and the immediately downstream (+2) nucleotide and between the +2 nucleotide and the immediately downstream (+3) nucleotide. In certain embodiments, backbone phosphorothioate chiral centers in Rp and Sp configurations, respectively, between the 5′ terminal (+1) nucleotide and the immediately downstream (+2) nucleotide and between the +2 nucleotide and the immediately downstream (+3) nucleotide. In certain embodiments described herein, the backbone phosphorothioate chiral centers are in Sp, Rp configurations, respectively, between the 5′ terminal (+1) nucleotide and the immediately downstream (+2) nucleotide and between the +2 nucleotide and the immediately downstream (+3) nucleotide.

[0287] In some embodiments, the guide strand comprises one or more backbone phosphorothioate chiral centers in Rp or Sp configuration upstream of backbone chiral centers in Sp configuration between the 3′ terminal nucleotide and the penultimate (N-1) nucleotide and as between the penultimate (N-1) nucleotide and the immediately upstream (N-2) nucleotide, and one or more of:
[0288] (1) a guide strand where one or both of the 5′ and 3′ terminal dinucleotides are not linked by non-negatively charged internucleotidic linkages, i.e., the guide strand comprises one more non-negatively charged internucleotidic linkages downstream, i.e., in the 3′ direction, relative to the linkage between the 5′ terminal dinucleotide and/or upstream, i.e., in the 5′ direction, relative to the linkage between the 3′ terminal dinucleotide;
[0289] (2) a guide strand where one or more Rp, Sp, or stereorandom non-negatively charged internucleotidic linkage occurs between any two adjacent nucleotides between the second (+2) nucleotide relative to the 5′ terminal nucleotide of the guide strand and the penultimate 3′ (N-1) nucleotide of the guide strand, where N is the 3′ terminal nucleotide;
[0290] (3) a guide strand where an Rp, Sp, or stereorandom non-negatively charged internucleotidic linkage occurs between the third (+3) and fourth (+4) nucleotides, relative to the 5′ terminal nucleotide, of the guide strand and/or between the tenth (+10) and eleventh (+11) nucleotides, relative to the 5′ terminal nucleotide;
[0291] (4) a passenger strand where one or more Rp, Sp, or stereorandom non-negatively charged internucleotidic linkage occurs upstream, i.e., in the 5′ direction, relative to the central nucleotide of the passenger strand; and
[0292] (5) Passenger strand where one or more Rp, Sp, or stereorandom non-negatively charged internucleotidic linkage occurs downstream, i.e., in the 3′ direction, relative to the central nucleotide of the passenger strand, and
   wherein the ds oligonucleotide further comprises a 2′ modification, e.g., a 2′ F modification, of the 3′ nucleotide of a nucleotide pair linked by an Rp, Sp, or stereorandom non-negatively charged internucleotidic linkage, and the passenger strand comprises one or more backbone chiral centers in Rp or Sp configuration. In certain embodiments, the one or more Rp, Sp, or stereorandom non-negatively charged internucleotidic linkage incorporated into the guide or passenger strand is an Rp non-negatively charged internucleotidic linkage. In certain embodiments, the one or more Rp, Sp, or stereorandom non-negatively charged internucleotidic linkage is an Sp non-negatively charged internucleotidic linkage. In certain embodiments, the one or more Rp, Sp, or stereorandom non-negatively charged internucleotidic linkage is a stereorandom non-negatively charged internucleotidic linkage.

[0293] In some embodiments, the guide strand comprises one or more backbone phosphorothioate chiral centers in Rp or Sp configuration between the 5′ terminal (+1) nucleotide and the immediately downstream (+2) nucleotide and between the (+2) nucleotide and the immediately downstream (+3) nucleotide, as well as between one or both of: (a) the (+3) nucleotide and the (+4) nucleotide; and (b) the (+5) nucleotide and the (+6) nucleotide, and one or more of:
[0294] (1) a guide strand where one or both of the 5′ and 3′ terminal dinucleotides are not linked by non-negatively charged internucleotidic linkages, i.e., the guide strand comprises one more non-negatively charged internucleotidic linkages downstream, i.e., in the 3′ direction, relative to the linkage between the 5′ terminal dinucleotide and/or upstream, i.e., in the 5′ direction, relative to the linkage between the 3′ terminal dinucleotide;
[0295] (2) a guide strand where one or more Rp, Sp, or stereorandom non-negatively charged internucleotidic linkage occurs between any two adjacent nucleotides between the second (+2) nucleotide relative to the 5′ terminal nucleotide of the guide strand and the penultimate 3′ (N-1) nucleotide of the guide strand, where N is the 3′ terminal nucleotide;
[0296] (3) a guide strand where an Rp, Sp, or stereorandom non-negatively charged internucleotidic linkage occurs between the third (+3) and fourth (+4) nucleotides, relative to the 5′ terminal nucleotide, of the guide strand and/or between the tenth (+10) and eleventh (+11) nucleotides, relative to the 5′ terminal nucleotide;
[0297] (4) a passenger strand where one or more Rp, Sp, or stereorandom non-negatively charged internucleotidic linkage occurs upstream, i.e., in the 5′ direction, relative to the central nucleotide of the passenger strand; and
[0298] (5) Passenger strand where one or more Rp, Sp, or stereorandom non-negatively charged internucleotidic linkage occurs downstream, i.e., in the 3′ direction, relative to the central nucleotide of the passenger strand, and
   wherein the ds oligonucleotide further comprises a 2′ modification, e.g., a 2′ F modification, of the 3′ nucleotide of a nucleotide pair linked by an Rp, Sp, or stereorandom non-negatively charged internucleotidic linkage, and the passenger strand comprises one or more backbone chiral centers in Rp or Sp configuration. In certain embodiments, the one or more Rp, Sp, or stereorandom non-negatively charged internucleotidic linkage incorporated into the guide or passenger strand is an Rp non-negatively charged internucleotidic linkage. In certain embodiments, the one or more Rp, Sp, or stereorandom non-negatively charged internucleotidic linkage is an Sp non-negatively charged internucleotidic linkage. In certain embodiments, the one or more Rp, Sp, or stereorandom non-negatively charged internucleotidic linkage is a stereorandom non-negatively charged internucleotidic linkage.

[0299] In some embodiments, the guide strand comprises one or more Rp, Sp, or stereorandom non-negatively charged internucleotidic linkage occurs between any two adjacent nucleotides between the second (+2) nucleotide relative to the 5′ terminal nucleotide of the guide strand and the penultimate 3′ (N-1) nucleotide of the guide strand, where N is the 3′ terminal nucleotide, a 2′ modification, e.g., a 2′ F modification, of the 3′ nucleotide of a nucleotide pair linked by an Rp, Sp, or stereorandom non-negatively charged internucleotidic linkage, and the passenger strand comprises one or more backbone chiral centers in Rp or Sp configuration.

[0300] In certain embodiments, the guide strand comprises backbone phosphorothioate chiral centers in Sp configuration between the 3′ terminal nucleotide and the penultimate (N-1) nucleotide and as between the penultimate (N-1) nucleotide and the immediately upstream (N-2) nucleotide, a 2′ modification, e.g., a 2′ F modification, of the 3′ nucleotide of a nucleotide pair linked by an Rp, Sp, or stereorandom non-negatively charged internucleotidic linkage, and the passenger strand comprises 0-n Rp, Sp, or stereorandom non-negatively charged internucleotidic linkages, where n is about 1 to 49 and one or more backbone chiral centers in Rp or Sp configuration.

[0301] In certain embodiments, the guide strand comprises backbone phosphorothioate chiral centers in Rp, Sp, or alternating configurations between the 5′ terminal (+1) nucleotide and the immediately downstream (+2) nucleotide and between the +2 nucleotide and the immediately downstream (+3) nucleotide, a 2′ modification, e.g., a 2′ F modification, of the 3′ nucleotide of a nucleotide pair linked by an Rp, Sp, or stereorandom non-negatively charged internucleotidic linkage, and the passenger strand comprises 0-n Rp, Sp, or stereorandom non-negatively charged internucleotidic linkages, where n is about 1 to 49 and one or more backbone chiral centers in Rp or Sp configuration. In certain embodiments, the one or more Rp, Sp, or stereorandom non-negatively charged internucleotidic linkage incorporated into the guide or passenger strand is an Rp non-negatively charged internucleotidic linkage. In certain embodiments, the one or more Rp, Sp, or stereorandom non-negatively charged internucleotidic linkage is an Sp non-negatively charged internucleotidic linkage. In certain embodiments, the one or more Rp, Sp, or stereorandom non-negatively charged internucleotidic linkage is a stereorandom non-negatively charged internucleotidic linkage.

[0302] In certain embodiments, the guide strand comprises one or more backbone phosphorothioate chiral centers in Rp or Sp configuration upstream of backbone phosphorothioate chiral centers in Sp configuration between the 3′ terminal nucleotide and the penultimate (N-1) nucleotide and as between the penultimate (N-1) nucleotide and the immediately upstream (N-2) nucleotide, a 2′ modification, e.g., a 2′ F modification, of the 3′ nucleotide of a nucleotide pair linked by an Rp, Sp, or stereorandom non-negatively charged internucleotidic linkage, and the passenger strand comprises 0-n Rp, Sp, or stereorandom non-negatively charged internucleotidic linkages, where n is about 1 to 49 and one or more backbone chiral centers in Rp or Sp configuration. In certain embodiments, the one or more Rp, Sp, or stereorandom non-negatively charged internucleotidic linkage incorporated into the guide strand is an Rp non-negatively charged internucleotidic linkage. In certain embodiments, the one or more Rp, Sp, or stereorandom non-negatively charged internucleotidic linkage is an Sp non-negatively charged internucleotidic linkage. In certain embodiments, the one or more Rp, Sp, or stereorandom non-negatively charged internucleotidic linkage is a stereorandom non-negatively charged internucleotidic linkage.

[0303] In certain embodiments, the guide strand comprises one or more Rp, Sp, or stereorandom non-negatively charged internucleotidic linkage occurs between any two adjacent nucleotides between the second (+2) nucleotide relative to the 5′ terminal nucleotide of the guide strand and the penultimate 3′ (N-1) nucleotide of the guide strand, where N is the 3′ terminal nucleotide, a 2′ modification, e.g., a 2′ F modification, of the 3′ nucleotide of a nucleotide pair linked by an Rp, Sp, or stereorandom non-negatively charged internucleotidic linkage, and the passenger strand comprises 0-n Rp, Sp, or stereorandom non-negatively charged internucleotidic linkages, where n is about 1 to 49 and one or more backbone chiral centers in Rp or Sp configuration. In certain embodiments, the one or more Rp, Sp, or stereorandom non-negatively charged internucleotidic linkage incorporated into the guide strand is an Rp non-negatively charged internucleotidic linkage. In certain embodiments, the one or more Rp, Sp, or stereorandom non-negatively charged internucleotidic linkage is an Sp non-negatively charged internucleotidic linkage. In certain embodiments, the one or more Rp, Sp, or stereorandom non-negatively charged internucleotidic linkage is a stereorandom non-negatively charged internucleotidic linkage.

[0304] In certain embodiments, internucleotidic linkages of an oligonucleotide comprise or consist of 1-5, 1-10, 1-15, 1-20, 1-25, 1-30, 1-40, 1-50, or 1, 2, 3, 4, 5, 6, 7, 8, 9, 10, 11, 12, 13, 14, 15, 16, 17, 18, 19, 20 or more chirally controlled internucleotidic linkages. In certain embodiments, the present disclosure provides a dsRNAi oligonucleotide composition wherein the dsRNAi oligonucleotides comprise at least one chirally controlled internucleotidic linkage.

[0305] In certain embodiments, the present disclosure provides a dsRNAi oligonucleotide composition wherein the dsRNAi oligonucleotides are stereorandom or not chirally controlled. In certain embodiments, in a dsRNAi oligonucleotide, at least one internucleotidic linkage is stereorandom and at least one internucleotidic linkage is chirally controlled.

[0306] In certain embodiments, internucleotidic linkages of an oligonucleotide comprise or consist of one or more neutrally charged internucleotidic linkages.

### HSD17B13

[0307] In some embodiments, HSD17B13 refers to a gene or a gene product thereof (including but not limited to, a nucleic acid, including but not limited to a DNA or RNA, a transcript, a protein encoded thereby; can be from any form of HSD17B13, e.g., wide-type or mutant alleles) from any species, which may be known as: ****. In some embodiments, it refers to the gene and product thereof in human. In some embodiments, it refers to the gene and product thereof in a non-human primate. Various HSD17B13 sequences, including variants thereof, from human, mouse, rat, monkey, etc., are readily available to those of skill in the art. In some embodiments, HSD17B13 is a human or mouse HSD17B13, which is wild-type or mutant. It has been reported that HSD17B13 can have a number of functions. Various technologies, e.g., assays, cells, animal models, etc., have also been reported and can be utilized for characterization and/or assessment of provided technologies (e.g., oligonucleotides, compositions, methods, etc.) in accordance with the present disclosure.

[0308] In some embodiments, a HSD17B13 gene, transcript (e.g., mRNA before or after splicing), or protein variant or isoform comprises a mutation. In some embodiments, a HSD17B13 gene, transcript or protein is or a transcription or translation product of an alternatively spliced variant or isoform.

### HSD17B13-Associated Conditions, Disorder, or Diseases

[0309] Various conditions, disorders, or diseases are reported to be associated with HSD17B13. Generally, a disease, disorder, or condition is associated with HSD17B13 if the presence, level, activity, and/or form of HSD17B13 and/or products (e.g., transcripts, encoded proteins, etc.) thereof correlates with incidence of and/or susceptibility to the disease, disorder, or condition (e.g., across a relevant population). In some embodiments, a condition, disorder, or disease associated with HSD17B13 may be treated and/or prevented by reducing expression, level and/or activity of HSD17B13 transcripts and/or proteins.

[0310] Various HSD17B13-associated conditions, disorders, or diseases are reported. In some embodiments, a HSD17B13-associated condition, disorder, or disease is NAFLD, NASH, ASH, alcoholic liver disease, nonalcoholic liver disease, alcoholic cirrhosis, nonalcoholic cirrhosis, steatohepatitis, hepatic steatosis, hepatoceullar carcinoma, HCV hepatitis, chronic hepatitis, hereditary hemochromatosis, primary sclerosing cholangitis, drug induced liver injury, or hepatocellular necrosis. In some embodiments, a HSD17B13-associated condition, disorder, or disease is NAFLD. In some embodiments, a HSD17B13-associated condition, disorder, or disease is NASH.

[0311] Among other things, provided technologies are useful for treating or preventing a condition, disorder, or disease associated with HSD17B13, e.g., NAFLD, NASH, ASH, alcoholic liver disease, nonalcoholic liver disease, alcoholic cirrhosis, nonalcoholic cirrhosis, steatohepatitis, hepatic steatosis, hepatoceullar carcinoma, HCV hepatitis, chronic hepatitis, hereditary hemochromatosis, primary sclerosing cholangitis, drug induced liver injury, or hepatocellular necrosis etc. In some embodiments, the present disclosure pertains to the use of a ds oligonucleotide targeting HSD17B13 or a composition thereof in the treatment of a HSD17B13-associated disorder, disease or condition, e.g., NAFLD, NASH, ASH, alcoholic liver disease, nonalcoholic liver disease, alcoholic cirrhosis, nonalcoholic cirrhosis, steatohepatitis, hepatic steatosis, hepatoceullar carcinoma, HCV hepatitis, chronic hepatitis, hereditary hemochromatosis, primary sclerosing cholangitis, drug induced liver injury, or hepatocellular necrosis, etc.

[0312] In some embodiments, treatment or prevention with provided technologies reduces rate of HSD17B13 production and reduces or halts or reverses accumulation of HSD17B13. In some embodiments, treatment or prevention with provided technologies reduces the rate of clinical decline, or delays or prevents onset of a condition, disorder, or disease.

[0313] As appreciated by those skilled in the art, mechanisms, genotypes, symptoms, biomarkers, etc. of such conditions, disorders, or diseases may be utilized in accordance with the present disclosure to characterize/assess provided technologies.

### Double Stranded Oligonucleotides

[0314] Among other things, the present disclosure provides ds oligonucleotides of various designs, which may comprise various nucleobases and patterns thereof, sugars and patterns thereof, internucleotidic linkages and patterns thereof, and/or additional chemical moieties and patterns thereof as described in the present disclosure. In some embodiments, provided ds oligonucleotides targeting HSD17B13 can direct a decrease in the expression, level and/or activity of a HSD17B13 gene and/or one or more of its products (e.g., transcripts, mRNA, proteins, etc.). In some embodiments, provided ds oligonucleotides targeting HSD17B13 can direct a decrease in the expression, level and/or activity of a HSD17B13 gene and/or one or more of its products in a cell of a subject or patient. In some embodiments, a cell normally expresses HSD17B13 or produces HSD17B13 protein. In some embodiments, provided ds oligonucleotides targeting HSD17B13 can direct a decrease in the expression, level and/or activity of a HSD17B13 target gene or a gene product and has a base sequence which consists of, comprises, or comprises a portion (e.g., a span of 10, 11, 12, 13, 14, 15, 16, 17, 18, 19, 20 or more contiguous bases) of the base sequence of a ds oligonucleotide targeting HSD17B13 disclosed herein, wherein each T can be independently substituted with U and vice versa, and the ds oligonucleotide comprises at least one non-naturally-occurring modification of a base, sugar and/or internucleotidic linkage.

[0315] In some embodiments, ds oligonucleotides targeting HSD17B13 can direct a decrease in the expression, level and/or activity of a target gene, e.g., a HSD17B13 target gene, or a product thereof. In some embodiments, ds oligonucleotides targeting HSD17B13 can direct a decrease in the expression, level and/or activity of a HSD17B13 target gene or a product thereof via RNase H-mediated knockdown. In some embodiments, ds oligonucleotides targeting HSD17B13 can direct a decrease in the expression, level and/or activity of a HSD17B13 target gene or a product thereof by sterically blocking translation after binding to a HSD17B13 target gene mRNA, and/or by altering or interfering with mRNA splicing. Regardless, however, the present disclosure is not limited to any particular mechanism. In some embodiments, the present disclosure provides oligonucleotides, compositions, methods, etc., capable of operating via double-stranded RNA interference.

[0316] In some embodiments, a ds oligonucleotide targeting HSD17B13 is capable of mediating a decrease in the expression, level and/or activity of HSD17B13. In some embodiments, a ds oligonucleotide targeting HSD17B13 is capable of mediating a decrease in the level of HSD17B13 proteins. In some embodiments, a ds oligonucleotide targeting HSD17B13 is capable of mediating a decrease in the level of HSD17B13 proteins.

[0317] In some embodiments, a ds oligonucleotide targeting HSD17B13 is capable of mediating a decrease in the expression, level and/or activity of HSD17B13 via a mechanism involving mRNA degradation.

[0318] In some embodiments, a ds oligonucleotide targeting HSD17B13 is capable of mediating a decrease in the expression, level and/or activity of more than one HSD17B13 allele.

[0319] In some embodiments, the present disclosure pertains to a method of treatment of a HSD17B13-associated disease, disorder or condition, wherein HSD17B13 is expressed, comprising the step of administering a therapeutically effective amount of a ds oligonucleotide targeting HSD17B13 capable of mediating a decrease in the expression, level and/or activity of HSD17B13. In some embodiments, multiple forms, e.g., alleles, of HSD17B13 may exist, and provided technologies can reduce expression, level and/or activity of two or more or all of the forms and products thereof.

[0320] In some embodiments, the present disclosure pertains to a method of treatment of a HSD17B13-associated disease, disorder or condition, comprising the step of administering a therapeutic amount of a ds oligonucleotide targeting HSD17B13 capable of mediating a decrease in the expression, level and/or activity of HSD17B13.

[0321] In some embodiments, a ds oligonucleotide targeting HSD17B13 is capable of mediating a decrease in the expression, level and/or activity of HSD17B13 via a mechanism involving splicing modulation, e.g., exon skipping.

[0322] In some embodiments, a ds oligonucleotide targeting HSD17B13 comprises a structural element or a portion thereof described herein, e.g., in Table 1. In some embodiments, a ds oligonucleotide targeting HSD17B13 comprises a base sequence (or a portion thereof) described herein, wherein each T can be independently substituted with U and vice versa, a chemical modification or a pattern of chemical modifications (or a portion thereof), and/or a format or a portion thereof described herein. In some embodiments, a ds oligonucleotide targeting HSD17B13 has a base sequence which comprises the base sequence (or a portion thereof) wherein each T can be independently substituted with U, pattern of chemical modifications (or a portion thereof), and/or a format of an oligonucleotide disclosed herein, e.g., in Table 1, or otherwise disclosed herein. In some embodiments, such oligonucleotides, e.g., ds oligonucleotides targeting HSD17B13, reduce expression, level and/or activity of a gene, e.g., a HSD17B13 gene, or a gene product thereof.

[0323] Among other things, ds oligonucleotides targeting HSD17B13 can hybridize to their target nucleic acids (e.g., pre-mRNA, mature mRNA, etc.). For example, in some embodiments, a ds oligonucleotide targeting HSD17B13 can hybridize to a HSD17B13 nucleic acid derived from a DNA strand (either strand of the HSD17B13 gene). In some embodiments, a ds oligonucleotide targeting HSD17B13 can hybridize to a HSD17B13 transcript. In some embodiments, a ds oligonucleotide targeting HSD17B13 can hybridize to a HSD17B13 nucleic acid in any stage of RNA processing, including but not limited to a pre-mRNA or a mature mRNA. In some embodiments, a ds oligonucleotide targeting HSD17B13 can hybridize to any element of a HSD17B13 nucleic acid or its complement, including but not limited to: a promoter region, an enhancer region, a transcriptional stop region, a translational start signal, a translation stop signal, a coding region, a non-coding region, an exon, an intron, an intron/exon or exon/intron junction, the 5′ UTR, or the 3′ UTR. In some embodiments, ds oligonucleotides targeting HSD17B13 can hybridize to their targets with no more than 2 mismatches. In some embodiments, ds oligonucleotides targeting HSD17B13 can hybridize to their targets with no more than one mismatch. In some embodiments, ds oligonucleotides targeting HSD17B13 can hybridize to their targets with no mismatches (e.g., when all C-G and/or A-T/U base paring).

[0324] In some embodiments, an oligonucleotide can hybridize to two or more variants of transcripts. In some embodiments, a ds oligonucleotide targeting HSD17B13 can hybridize to two or more or all variants of HSD17B13 transcripts. In some embodiments, a ds oligonucleotide targeting HSD17B13 can hybridize to two or more or all variants of HSD17B13 transcripts derived from the sense strand.

[0325] In some embodiments, a HSD17B13 target of a ds oligonucleotide targeting HSD17B13 is a HSD17B13 RNA which is not a mRNA.

[0326] In some embodiments, oligonucleotides, e.g., ds oligonucleotides targeting HSD17B13, contain increased levels of one or more isotopes. In some embodiments, oligonucleotides, e.g., ds oligonucleotides targeting HSD17B13, are labeled, e.g., by one or more isotopes of one or more elements, e.g., hydrogen, carbon, nitrogen, etc. In some embodiments, oligonucleotides, e.g., ds oligonucleotides targeting HSD17B13, in provided compositions, e.g., oligonucleotides of a plurality of a composition, comprise base modifications, sugar modifications, and/or internucleotidic linkage modifications, wherein the oligonucleotides contain an enriched level of deuterium. In some embodiments, oligonucleotides, e.g., ds oligonucleotides targeting HSD17B13, are labeled with deuterium (replacing -¹H with -²H) at one or more positions. In some embodiments, one or more ¹H of an oligonucleotide chain or any moiety conjugated to the oligonucleotide chain (e.g., a targeting moiety, etc.) is substituted with ²H. Such oligonucleotides can be used in compositions and methods described herein.

[0327] In some embodiments, the present disclosure provides an oligonucleotide composition comprising a plurality of oligonucleotides which:
[0328] 1) have a common base sequence complementary to a target sequence (e.g., a HSD17B13 target sequence) in a transcript; and
[0329] 2) comprise one or more modified sugar moieties and/or modified internucleotidic linkages.

[0330] In some embodiments, ds oligonucleotides targeting HSD17B13 having a common base sequence may have the same pattern of nucleoside modifications, e.g., sugar modifications, base modifications, etc. In some embodiments, a pattern of nucleoside modifications may be represented by a combination of locations and modifications. In some embodiments, a pattern of backbone linkages comprises locations and types (e.g., phosphate, phosphorothioate, substituted phosphorothioate, etc.) of each internucleotidic linkage.

[0331] In some embodiments, oligonucleotides of a plurality, e.g., in provided compositions, are of the same oligonucleotide type. In some embodiments, oligonucleotides of an oligonucleotide type have a common pattern of sugar modifications. In some embodiments, oligonucleotides of an oligonucleotide type have a common pattern of base modifications. In some embodiments, oligonucleotides of an oligonucleotide type have a common pattern of nucleoside modifications. In some embodiments, oligonucleotides of an oligonucleotide type have the same constitution. In some embodiments, oligonucleotides of an oligonucleotide type are identical. In some embodiments, oligonucleotides of a plurality are identical. In some embodiments, oligonucleotides of a plurality share the same constitution.

[0332] In some embodiments, as exemplified herein, ds oligonucleotides targeting HSD17B13 are chiral controlled, comprising one or more chirally controlled internucleotidic linkages. In some embodiments, ds oligonucleotides targeting HSD17B13 are stereochemically pure. In some embodiments, ds oligonucleotides targeting HSD17B13 are substantially separated from other stereoisomers.

[0333] In some embodiments, ds oligonucleotides targeting HSD17B13 comprise one or more modified nucleobases, one or more modified sugars, and/or one or more modified internucleotidic linkages.

[0334] In some embodiments, ds oligonucleotides targeting HSD17B13 comprise one or more modified sugars. In some embodiments, oligonucleotides of the present disclosure comprise one or more modified nucleobases. Various modifications can be introduced to a sugar and/or nucleobase in accordance with the present disclosure. For example, in some embodiments, a modification is a modification described in U.S. Pat. No. 9,006,198. In some embodiments, a modification is a modification described in U.S. Pat. Nos. 9,394,333, 9,744,183, 9,605,019, 9,598,458, 9,982,257, U.S. Ser. No. 10/160,969, U.S. Ser. No. 10/479,995, US 2020/0056173, US 2018/0216107, US 2019/0127733, U.S. Ser. No. 10/450,568, US 2019/0077817, US 2019/0249173, US 2019/0375774, WO 2018/223056, WO 2018/223073, WO 2018/223081, WO 2018/237194, WO 2019/032607, WO 2019/055951, WO 2019/075357, WO 2019/200185, WO 2019/217784, WO 2019/032612, and/or WO 2020/191252, the sugar, base, and internucleotidic linkage modifications of each of which are independently incorporated herein by reference.

[0335] As used in the present disclosure, in some embodiments, “one or more” is 1-200, 1-150, 1-100, 1-90, 1-80, 1-70, 1-60, 1-50, 1-40, 1-30, or 1, 2, 3, 4, 5, 6, 7, 8, 9, 10, 11, 12, 13, 14, 15, 16, 17, 18, 19, 20, 21, 22, 23, 24, or 25. In some embodiments, “one or more” is one. In some embodiments, “one or more” is two. In some embodiments, “one or more” is three. In some embodiments, “one or more” is four. In some embodiments, “one or more” is five. In some embodiments, “one or more” is six. In some embodiments, “one or more” is seven. In some embodiments, “one or more” is eight. In some embodiments, “one or more” is nine. In some embodiments, “one or more” is ten. In some embodiments, “one or more” is at least one. In some embodiments, “one or more” is at least two. In some embodiments, “one or more” is at least three. In some embodiments, “one or more” is at least four. In some embodiments, “one or more” is at least five. In some embodiments, “one or more” is at least six. In some embodiments, “one or more” is at least seven. In some embodiments, “one or more” is at least eight. In some embodiments, “one or more” is at least nine. In some embodiments, “one or more” is at least ten.

[0336] As used in the present disclosure, in some embodiments, “at least one” is 1-200, 1-150, 1-100, 1-90, 1-80, 1-70, 1-60, 1-50, 1-40, 1-30, or 1, 2, 3, 4, 5, 6, 7, 8, 9, 10, 11, 12, 13, 14, 15, 16, 17, 18, 19, 20, 21, 22, 23, 24, or 25. In some embodiments, “at least one” is one. In some embodiments, “at least one” is two. In some embodiments, “at least one” is three. In some embodiments, “at least one” is four. In some embodiments, “at least one” is five. In some embodiments, “at least one” is six. In some embodiments, “at least one” is seven. In some embodiments, “at least one” is eight. In some embodiments, “at least one” is nine. In some embodiments, “at least one” is ten.

[0337] In some embodiments, a ds oligonucleotide targeting HSD17B13 is or comprises a ds oligonucleotide targeting HSD17B13 described in Table 1.

[0338] As demonstrated in the present disclosure, in some embodiments, a provided oligonucleotide (e.g., a ds oligonucleotide targeting HSD17B13) is characterized in that, when it is contacted with the transcript in a knockdown system, knockdown of its target (e.g., a HSD17B13 transcript for a ds oligonucleotide targeting HSD17B13) is achieved.

[0339] In some embodiments, ds oligonucleotides are provided as salt forms. In some embodiments, ds oligonucleotides are provided as salts comprising negatively-charged internucleotidic linkages (e.g., phosphorothioate internucleotidic linkages, natural phosphate linkages, etc.) existing as their salt forms. In some embodiments, ds oligonucleotides are provided as pharmaceutically acceptable salts. In some embodiments, ds oligonucleotides are provided as metal salts. In some embodiments, oligonucleotides are provided as sodium salts. In some embodiments, ds oligonucleotides are provided as metal salts, e.g., sodium salts, wherein each negatively-charged internucleotidic linkage is independently in a salt form (e.g., for sodium salts, —O—P(O)(SNa)—O— for a phosphorothioate internucleotidic linkage, —O—P(O)(ONa)—O— for a natural phosphate linkage, etc.).

### Double Stranded Oligonucleotide Base Sequences

[0340] In some embodiments, a ds oligonucleotide targeting HSD17B13 comprises a base sequence described herein or a portion (e.g., a span of 5-50, 5-40, 5-30, 5-20, or 5, 6, 7, 8, 9, 10, 11, 12, 13, 14, 15, 16, 17, 18, 19, 20, 21, 22, 23, 24, 25, 26, 27, 28, 30 or at least 10, at least 15, contiguous nucleobases) thereof with 0-5 (e.g., 0, 1, 2, 3, 4 or 5) mismatches, wherein each T can be independently substituted with U and vice versa. In some embodiments, a ds oligonucleotide targeting HSD17B13 comprises a base sequence described herein, or a portion thereof, wherein a portion is a span of at least 10 contiguous nucleobases, or a span of at least 15 contiguous nucleobases with 1-5 mismatches. In some embodiments, ds oligonucleotides targeting HSD17B13 comprise a base sequence described herein, or a portion thereof, wherein a portion is a span of at least 10 contiguous nucleobases, or a span of at least 10 contiguous nucleobases with 1-5 mismatches, wherein each T can be independently substituted with U and vice versa. In some embodiments, base sequences of oligonucleotides comprise or consists of 10-50 (e.g., about or at least 10, 11, 12, 13, 14, 15, 16, 17, 18, 19, 20, 21, 22, 23, 24, 25, 30, 35, 40, 45; in some embodiments, at least 15; in some embodiments, at least 16; in some embodiments, at least 17; in some embodiments, at least 18; in some embodiments, at least 19; in some embodiments, at least 20; in some embodiments, at least 21; in some embodiments, at least 22; in some embodiments, at least 23; in some embodiments, at least 24; in some embodiments, at least 25) contiguous bases of a base sequence that is identical to or complementary to a base sequence of a HSD17B13 gene or a transcript (e.g., mRNA) thereof (e.g., in an intron).

[0341] Base sequences of ds oligonucleotides targeting HSD17B13, as appreciated by those skilled in the art, typically have sufficient length and complementarity to their targets, e.g., RNA transcripts (e.g., pre-mRNA, mature mRNA, etc.) to mediate target-specific knockdown. In some embodiments, the base sequence of a ds oligonucleotide targeting HSD17B13 has a sufficient length and identity to a HSD17B13 transcript target to mediate target-specific knockdown. In some embodiments, the ds oligonucleotide targeting HSD17B13 is complementary to a portion of a HSD17B13 transcript (a HSD17B13 transcript target sequence). In some embodiments, the base sequence of a ds oligonucleotide targeting HSD17B13 has 90% or more identity with the base sequence of an oligonucleotide disclosed in Table 1, wherein each T can be independently substituted with U and vice versa. In some embodiments, the base sequence of a ds oligonucleotide targeting HSD17B13 has 95% or more identity with the base sequence of an oligonucleotide disclosed in Table 1, wherein each T can be independently substituted with U and vice versa. In some embodiments, the base sequence of a ds oligonucleotide targeting HSD17B13 comprises a continuous span of 15 or more bases of an oligonucleotide disclosed in Table 1, wherein each T can be independently substituted with U and vice versa, except that one or more bases within the span are abasic (e.g., a nucleobase is absent from a nucleotide). In some embodiments, the base sequence of a ds oligonucleotide targeting HSD17B13 comprises a continuous span of 19 or more bases of a ds oligonucleotide targeting HSD17B13 disclosed herein, except that one or more bases within the span are abasic (e.g., a nucleobase is absent from a nucleotide). In some embodiments, the base sequence of a ds oligonucleotide targeting HSD17B13 comprises a continuous span of 19 or more bases of an oligonucleotide disclosed herein, wherein each T can be independently substituted with U and vice versa, except for a difference in the 1 or 2 bases at the 5′ end and/or 3′ end of the base sequences.

[0342] In some embodiments, the present disclosure pertains to an oligonucleotide having a base sequence which comprises the base sequence of any oligonucleotide disclosed herein, wherein each T may be independently replaced with U and vice versa.

[0343] In some embodiments, the present disclosure pertains to an oligonucleotide having a base sequence which comprises at least 15 contiguous bases of the base sequence of any oligonucleotide disclosed herein, wherein each T may be independently replaced with U and vice versa.

[0344] In some embodiments, the present disclosure pertains to an oligonucleotide having a base sequence which is at least 90% identical to the base sequence of any oligonucleotide disclosed herein, wherein each T may be independently replaced with U and vice versa.

[0345] In some embodiments, the present disclosure pertains to an oligonucleotide having a base sequence which is at least 95% identical to the base sequence of any oligonucleotide disclosed herein, wherein each T may be independently replaced with U and vice versa.

[0346] In some embodiments, a ds oligonucleotide targeting HSD17B13 is selected from Table 1.

[0347] In some embodiments, the base sequence of a ds oligonucleotide targeting HSD17B13 is complementary to that of a HSD17B13 transcript or a portion thereof.

[0348] In some embodiments, the base sequence of a ds oligonucleotide targeting HSD17B13 is complementary to a portion of a HSD17B13 nucleic acid sequence, e.g., a HSD17B13 gene sequence, a HSD17B13 transcript, a HSD17B13 mRNA sequence, etc. In some embodiments, ads oligonucleotide targeting HSD17B13 is identical to a portion of a HSD17B13 nucleic acid sequence, e.g., a HSD17B13 gene sequence, a HSD17B13 transcript, a HSD17B13 mRNA sequence, etc. In some embodiments, the base sequence of such a portion is characteristic of HSD17B13 in that no other genomic or transcript sequences in a system contain the same sequence as the portion. In some embodiments, no other genomic or transcript sequences in a system contain a sequence that differs from such a portion at no more than 1 nucleobase. In some embodiments, no other genomic or transcript sequences in a system contain a sequence that differs from such a portion at no more than 2 nucleobases. In some embodiments, a portion of a gene that is complementary to an oligonucleotide is referred to as a target sequence of the oligonucleotide. In some embodiments, a system is or comprises a cell, sample, tissue, organ, or a species. For example, for oligonucleotides targeting human HSD17B13, a relevant species in many embodiments is human. In some embodiments, a system can be or comprises multiple species, e.g., when cross-species activities and/or properties are characterized and/or assessed. In some embodiments, such a portion is in an exon. In some embodiments, such a portion is in an intron. In some embodiments, such a portion spans an intron and an exon. In some embodiments, such a portion spans two exons. In some embodiments, such a portion is in a 5′-UTR region. In some embodiments, such a portion is in a 3′-UTR region.

[0349] In some embodiments, a ds oligonucleotide targeting HSD17B13 targets two or more or all alleles (if multiple alleles exist in a relevant system) of HSD17B13. In some embodiments, an oligonucleotide reduces expressions, levels and/or activities of both wild-type HSD17B13 and mutant HSD17B13, and/or transcripts and/or products thereof.

[0350] In some embodiments, base sequences of provided oligonucleotides are fully complementary to both human and a non-human primate (NHP) HSD17B13 target sequences. In some embodiments, such sequences can be particularly useful as they can be readily assessed in both human and non-human primates.

[0351] In some embodiments, a ds oligonucleotide targeting HSD17B13 comprises a base sequence or portion thereof described in the Tables, wherein each T may be independently replaced with U and vice versa, and/or a sugar, nucleobase, and/or internucleotidic linkage modification and/or a pattern thereof described in Table 1, and/or an additional chemical moiety (in addition to an oligonucleotide chain, e.g., a target moiety, a lipid moiety, a carbohydrate moiety, etc.) described in Table 1.

[0352] In some embodiments, the terms “complementary,” “fully complementary” and “substantially complementary” may be used with respect to the base matching between n oligonucleotide (e.g., a ds oligonucleotide targeting HSD17B13) base sequence and a target sequence (e.g., a HSD17B13 target sequence), as will be understood by those skilled in the art from the context of their use. It is noted that substitution of T for U, or vice versa, generally does not alter the amount of complementarity. As used herein, an oligonucleotide that is “substantially complementary” to a target sequence is largely or mostly complementary but not 100% complementary. In some embodiments, a sequence (e.g., a ds oligonucleotide targeting HSD17B13) which is substantially complementary has 1, 2, 3, 4 or 5 mismatches when aligned to its target sequence. In some embodiments, ads oligonucleotide targeting HSD17B13 has a base sequence which is substantially complementary to a HSD17B13 target sequence. In some embodiments, a ds oligonucleotide targeting HSD17B13 has a base sequence which is substantially complementary to the complement of the sequence of a ds oligonucleotide targeting HSD17B13 disclosed herein. As appreciated by those skilled in the art, in some embodiments, sequences of oligonucleotides need not be 100% complementary to their targets for the oligonucleotides to perform their functions (e.g., knockdown of target nucleic acids. Typically, when determining complementarity, A and T (or U) are complementary nucleobases and C and G are complementary nucleobases.

[0353] In some embodiments, the present disclosure provides a ds oligonucleotide targeting HSD17B13 comprising a sequence found in an oligonucleotide described in a Table. In some embodiments, the present disclosure provides a ds oligonucleotide targeting HSD17B13 comprising a sequence found in an oligonucleotide described in Table 1, wherein one or more U is independently and optionally replaced with T or vice versa. In some embodiments, a ds oligonucleotide targeting HSD17B13 can comprise at least one T and/or at least one U. In some embodiments, the present disclosure provides a ds oligonucleotide targeting HSD17B13 comprising a sequence found in an oligonucleotide described in a Table, wherein the said sequence has over 50% identity with the sequence of the oligonucleotide described in the Table. In some embodiments, the present disclosure provides a ds oligonucleotide targeting HSD17B13 comprising the sequence of an oligonucleotide disclosed in Table 1. In some embodiments, the present disclosure provides a ds oligonucleotide targeting HSD17B13 whose base sequence is the sequence of an oligonucleotide disclosed in Table 1, wherein each T may be independently replaced with U and vice versa. In some embodiments, the present disclosure provides a ds oligonucleotide targeting HSD17B13 comprising a sequence found in an oligonucleotide in Table 1, wherein the oligonucleotides have a pattern of backbone linkages, pattern of backbone chiral centers, and/or pattern of backbone phosphorus modifications of the same oligonucleotide or another oligonucleotide in Table 1.

[0354] Among other things, the present disclosure presents, in Table 1 and elsewhere, various ds oligonucleotides, each of which has a defined base sequence. In some embodiments, the present disclosure, the present disclosure provides an oligonucleotide whose base sequence which is, comprises, or comprises a portion of the base sequence of an oligonucleotide disclosed herein, e.g., in Table 1 herein, wherein each T may be independently replaced with U and vice versa. In some embodiments, the disclosure provides an oligonucleotide having a base sequence which is, comprises, or comprises a portion of the base sequence of an oligonucleotide disclosed herein, e.g., in Table 1, wherein each T may be independently replaced with U and vice versa, wherein the oligonucleotide further comprises a chemical modification, stereochemistry, format, an additional chemical moiety described herein (e.g., a targeting moiety, lipid moiety, carbohydrate moiety, etc.), and/or another structural feature.

[0355] In some embodiments, a “portion” (e.g., of a base sequence or a pattern of modifications) is at least 5, 6, 7, 8, 9, 10, 11, 12, 13, 14, 15, 16, 17, 18, 19, or 20 monomeric units long (e.g., for a base sequence, at least 5, 6, 7, 8, 9, 10, 11, 12, 13, 14, 15, 16, 17, 18, 19, or 20 bases long). In some embodiments, a “portion” of a base sequence is at least 5 bases long. In some embodiments, a “portion” of a base sequence is at least 10 bases long. In some embodiments, a “portion” of a base sequence is at least 15 bases long. In some embodiments, a “portion” of a base sequence is at least 16, 17, 18, 19 or 20 bases long. In some embodiments, a “portion” of a base sequence is at least 20 bases long. In some embodiments, a portion of a base sequence is 10, 11, 12, 13, 14, 15, 16, 17, 18, 19 or more contiguous (consecutive) bases. In some embodiments, a portion of a base sequence is 15 or more contiguous (consecutive) bases. In some embodiments, a portion of a base sequence is 16, 17, 18, 19 or 20 or more contiguous (consecutive) bases. In some embodiments, a portion of a base sequence is 20 or more contiguous (consecutive) bases.

[0356] In some embodiments, the present disclosure provides an oligonucleotide (e.g., a ds oligonucleotide targeting HSD17B13) whose base sequence is a base sequence of an oligonucleotide in Table 1 or a portion thereof, wherein each T may be independently replaced with U and vice versa. In some embodiments, the present disclosure provides a ds oligonucleotide targeting HSD17B13 of a sequence of an oligonucleotide in Table 1, wherein the oligonucleotide is capable of directing a decrease in the expression, level and/or activity of a HSD17B13 gene or a gene product thereof. As appreciated by those skilled in the art, in provided base sequence, each U may be optionally and independently replaced by T or vice versa, and a sequence can comprise a mixture of U and T. In some embodiments, C may be optionally and independently replaced with 5mC.

[0357] In some embodiments, a portion is a span of at least 15, 16, 17, 18, 19, 20, 21, 22, 23, 24, or 25 total nucleotides. In some embodiments, a portion is a span of at least 15, 16, 17, 18, 19, 20, 21, 22, 23, 24, or 25 total nucleotides with 0-3 mismatches. In some embodiments, a portion is a span of at least 15, 16, 17, 18, 19, 20, 21, 22, 23, 24, or 25 total nucleotides with 0-3 mismatches, wherein a span with 0 mismatches is complementary and a span with 1 or more mismatches is a non-limiting example of substantial complementarity. In some embodiments, a base comprises a portion characteristic of a nucleic acid (e.g., a gene) in that the portion is identical or complementary to a portion of the nucleic acid or a transcript thereof, and is not identical or complementary to a portion of any other nucleic acid (e.g., a gene) or a transcript thereof in the same genome. In some embodiments, a portion is characteristic of human HSD17B13.

[0358] In some embodiments, a provided oligonucleotide, e.g., a ds oligonucleotide targeting HSD17B13, has a length of no more than about 49, 45, 40, 30, 35, 25, or 23 total nucleotides as described herein. In some embodiments, wherein the sequence recited herein starts with a U or T at the 5′-end, the U can be deleted and/or replaced by another base. In some embodiments, an oligonucleotide has a base sequence which is or comprises or comprises a portion of the base sequence of an oligonucleotide in a Table, wherein each T may be independently replaced with U and vice versa, which has a format or a portion of a format disclosed herein.

[0359] In some embodiments, oligonucleotides, e.g., ds oligonucleotides targeting HSD17B13 are stereorandom. In some embodiments, ds oligonucleotides targeting HSD17B13 are chirally controlled. In some embodiments, a ds oligonucleotide targeting HSD17B13 is chirally pure (or “stereopure”, “stereochemically pure”), wherein the oligonucleotide exists as a single stereoisomeric form (in many cases a single diastereoisomeric (or “diastereomeric”) form as multiple chiral centers may exist in an oligonucleotide, e.g., at linkage phosphorus, sugar carbon, etc.). As appreciated by those skilled in the art, a chirally pure oligonucleotide is separated from its other stereoisomeric forms (to the extent that some impurities may exist as chemical and biological processes, selectivities and/or purifications etc. rarely, if ever, go to absolute completeness). In a chirally pure oligonucleotide, each chiral center is independently defined with respect to its configuration (for a chirally pure oligonucleotide, each internucleotidic linkage is independently stereodefined or chirally controlled). In contrast to chirally controlled and chirally pure oligonucleotides which comprise stereodefined linkage phosphorus, racemic (or “stereorandom”, “non-chirally controlled”) oligonucleotides comprising chiral linkage phosphorus, e.g., from traditional phosphoramidite oligonucleotide synthesis without stereochemical control during coupling steps in combination with traditional sulfurization (creating stereorandom phosphorothioate internucleotidic linkages), refer to a random mixture of various stereoisomers (typically diastereoisomers (or “diastereomers”) as there are multiple chiral centers in an oligonucleotide; e.g., from traditional oligonucleotide preparation using reagents containing no chiral elements other than those in nucleosides and linkage phosphorus). For example, for A*A*A wherein * is a phosphorothioate internucleotidic linkage (which comprises a chiral linkage phosphorus), a racemic oligonucleotide preparation includes four diastereomers [2²=4, considering the two chiral linkage phosphorus, each of which can exist in either of two configurations (Sp or Rp)]: A *S A *S A, A *S A *R A, A *R A *S A, and A *R A *R A, wherein *S represents a Sp phosphorothioate internucleotidic linkage and *R represents a Rp phosphorothioate internucleotidic linkage. For a chirally pure oligonucleotide, e.g., A *S A *S A, it exists in a single stereoisomeric form and it is separated from the other stereoisomers (e.g., the diastereomers A *S A *R A, A *R A *S A, and A *R A *R A).

[0360] In some embodiments, ds oligonucleotides targeting HSD17B13 comprise 1, 2, 3, 4, 5, 6, 7, 8, 9, 10 or more stereorandom internucleotidic linkages (mixture of Rp and Sp linkage phosphorus at the internucleotidic linkage, e.g., from traditional non-chirally controlled oligonucleotide synthesis). In some embodiments, ds oligonucleotides targeting HSD17B13 comprise one or more (e.g., 1-50, 1-40, 1-30, 1-25, 1-20, 1, 2, 3, 4, 5, 6, 7, 8, 9, 10, 11, 12, 13, 14, 15, 16, 17, 18, 19, 20, 21, 22, 23, 24, 25 or more) chirally controlled internucleotidic linkages (Rp or Sp linkage phosphorus at the internucleotidic linkage, e.g., from chirally controlled oligonucleotide synthesis). In some embodiments, an internucleotidic linkage is a phosphorothioate internucleotidic linkage. In some embodiments, an internucleotidic linkage is a stereorandom phosphorothioate internucleotidic linkage. In some embodiments, an internucleotidic linkage is a chirally controlled phosphorothioate internucleotidic linkage.

[0361] Among other things, the present disclosure provides technologies for preparing chirally controlled (in some embodiments, stereochemically pure) oligonucleotides. In some embodiments, oligonucleotides are stereochemically pure. In some embodiments, oligonucleotides of the present disclosure are about 5%-100%, 10%-100%, 20%-100%, 30%-100%, 40%-100%, 50%-100%, 60%-100%, 70%-100%, 80-100%, 90-100%, 95-100%, 50%-90%, or about 5%, 10%, 15%, 20%, 25%, 30%, 35%, 40%, 45%, 50%, 55%, 60%, 65%, 70%, 75%, 80%, 85%, 90%, 95%, or 100%, or at least about 5%, 10%, 15%, 20%, 25%, 30%, 35%, 40%, 45%, 50%, 55%, 60%, 65%, 70%, 75%, 80%, 85%, 90%, 95%, or 99%, pure. In some embodiments, internucleotidic linkages of oligonucleotides comprise or consist of one or more (e.g., 1-50, 1-40, 1-30, 1-25, 1-20, 5-50, 5-40, 5-30, 5-25, 5-20, 1, 2, 3, 4, 5, 6, 7, 8, 9, 10, 11, 12, 13, 14, 15, 16, 17, 18, 19, 20, 21, 22, 23, 24, 25 or more) chiral internucleotidic linkages, each of which independently has a diastereopurity of at least 80%, 85%, 90%, 91%, 92%, 93%, 94%, 95%, 96%, 97%, 98%, 99% or 99.5%, typically at least 90%, 91%, 92%, 93%, 94%, 95%, 96%, 97%, 98%, 99% or 99.5%. In some embodiments, oligonucleotides of the present disclosure, e.g., Ds oligonucleotides targeting HSD17B13, have a diastereopurity of (DS)^{CIL}, wherein DS is a diastereopurity as described in the present disclosure (e.g., 90%, 91%, 92%, 93%, 94%, 95%, 96%, 97%, 98%, 99% or 99.5% or more) and CIL is the number of chirally controlled internucleotidic linkages (e.g., 1-50, 1-40, 1-30, 1-25, 1-20, 5-50, 5-40, 5-30, 5-25, 5-20, 1, 2, 3, 4, 5, 6, 7, 8, 9, 10, 11, 12, 13, 14, 15, 16, 17, 18, 19, 20, 21, 22, 23, 24, 25 or more). In some embodiments, DS is 95%-100%. In some embodiments, each internucleotidic linkage is independently chirally controlled, and CIL is the number of chirally controlled internucleotidic linkages.

[0362] As examples, certain ds oligonucleotides targeting HSD17B13 comprising certain example base sequences, nucleobase modifications and patterns thereof, sugar modifications and patterns thereof, internucleotidic linkages and patterns thereof, linkage phosphorus stereochemistry and patterns thereof, linkers, and/or additional chemical moieties are presented in Table 1, below. Among other things, oligonucleotides, e.g., those in Table 1, may be utilized to target a HSD17B13 transcript, e.g., to reduce the level of a HSD17B13 transcript and/or a product thereof.

[0363] In certain exemplary embodiments, the ds oligonucleotide targeting HSD17B13 of the present disclosure comprises the base sequence, nucleobase modifications and patterns thereof, sugar modifications and patterns thereof, internucleotidic linkages and patterns thereof, linkage phosphorus stereochemistry and patterns thereof, linkers, and/or additional chemical moieties of: WV-42589; WV-47139; WV-47159; WV-49590; or WV-49591. In certain exemplary embodiments, a ds oligonucleotide targeting HSD17B13 of the present disclosure comprises a guide strand comprising the base sequence, nucleobase modifications and patterns thereof, sugar modifications and patterns thereof, internucleotidic linkages and patterns thereof, linkage phosphorus stereochemistry and patterns thereof, linkers, and/or additional chemical moieties of: WV-47139; WV-47159; WV-49590; or WV-49591. In certain exemplary embodiments, a ds oligonucleotide targeting HSD17B13 of the present disclosure comprises a passenger strand comprising the base sequence, nucleobase modifications and patterns thereof, sugar modifications and patterns thereof, internucleotidic linkages and patterns thereof, linkage phosphorus stereochemistry and patterns thereof, linkers, and/or additional chemical moieties of WV-42589. In certain exemplary embodiments, a ds oligonucleotide targeting HSD17B13 of the present disclosure comprises a guide strand comprising the base sequence, nucleobase modifications and patterns thereof, sugar modifications and patterns thereof, internucleotidic linkages and patterns thereof, linkage phosphorus stereochemistry and patterns thereof, linkers, and/or additional chemical moieties of: WV-47139; WV-47159; WV-49590; or WV-49591 and a passenger strand comprising the base sequence, nucleobase modifications and patterns thereof, sugar modifications and patterns thereof, internucleotidic linkages and patterns thereof, linkage phosphorus stereochemistry and patterns thereof, linkers, and/or additional chemical moieties of WV-42589.

[0364] In certain exemplary embodiments, a ds oligonucleotide targeting HSD17B13 of the present disclosure comprises a guide strand comprising the base sequence, nucleobase modifications and patterns thereof, sugar modifications and patterns thereof, internucleotidic linkages and patterns thereof, linkage phosphorus stereochemistry and patterns thereof, linkers, and/or additional chemical moieties of WV-47139 and a passenger strand comprising the base sequence, nucleobase modifications and patterns thereof, sugar modifications and patterns thereof, internucleotidic linkages and patterns thereof, linkage phosphorus stereochemistry and patterns thereof, linkers, and/or additional chemical moieties of WV-42589. In certain exemplary embodiments, a ds oligonucleotide targeting HSD17B13 of the present disclosure comprises a guide strand comprising WV-47139 and a passenger strand comprising WV-42589.

[0365] In certain exemplary embodiments, a ds oligonucleotide targeting HSD17B13 of the present disclosure comprises a guide strand comprising the base sequence, nucleobase modifications and patterns thereof, sugar modifications and patterns thereof, internucleotidic linkages and patterns thereof, linkage phosphorus stereochemistry and patterns thereof, linkers, and/or additional chemical moieties of WV-47159 and a passenger strand comprising the base sequence, nucleobase modifications and patterns thereof, sugar modifications and patterns thereof, internucleotidic linkages and patterns thereof, linkage phosphorus stereochemistry and patterns thereof, linkers, and/or additional chemical moieties of: WV-42589. In certain exemplary embodiments, a ds oligonucleotide targeting HSD17B13 of the present disclosure comprises a guide strand comprising WV-47159 and a passenger strand comprising WV-42589.

[0366] In certain exemplary embodiments, a ds oligonucleotide targeting HSD17B13 of the present disclosure comprises a guide strand comprising the base sequence, nucleobase modifications and patterns thereof, sugar modifications and patterns thereof, internucleotidic linkages and patterns thereof, linkage phosphorus stereochemistry and patterns thereof, linkers, and/or additional chemical moieties of WV-49590 and a passenger strand comprising the base sequence, nucleobase modifications and patterns thereof, sugar modifications and patterns thereof, internucleotidic linkages and patterns thereof, linkage phosphorus stereochemistry and patterns thereof, linkers, and/or additional chemical moieties of WV-42589. In certain exemplary embodiments, a ds oligonucleotide targeting HSD17B13 of the present disclosure comprises a guide strand comprising WV-49590 and a passenger strand comprising WV-42589.

[0367] In certain exemplary embodiments, a ds oligonucleotide targeting HSD17B13 of the present disclosure comprises a guide strand comprising the base sequence, nucleobase modifications and patterns thereof, sugar modifications and patterns thereof, internucleotidic linkages and patterns thereof, linkage phosphorus stereochemistry and patterns thereof, linkers, and/or additional chemical moieties of WV-49591 and a passenger strand comprising the base sequence, nucleobase modifications and patterns thereof, sugar modifications and patterns thereof, internucleotidic linkages and patterns thereof, linkage phosphorus stereochemistry and patterns thereof, linkers, and/or additional chemical moieties of: WV-42589. In certain exemplary embodiments, a ds oligonucleotide targeting HSD17B13 of the present disclosure comprises a guide strand comprising WV-49591 and a passenger strand comprising WV-42589.

TABLE 1
Example Double Stranded Oligonucleotides Targeting HSD17B13.

| | | | Stereochemistry/ |
|---|---|---|---|
| ID | Description | Naked Sequence | linkage |
| WV-38227 | fU*fC*mUfGmGfUmUfCmAfGmUmCmCfUmUfGmU | UCUGGUUCAGUCCUUGUG | XXOOOOOOOOOOOOOOOOXX |
| | fGmU*mU*mU | UUU | |
| WV-38228 | fU*fU*mCfUmGfGmUfUmCfAmGmUmCfCmUfUmG | UUCUGGUUCAGUCCUUGU | XXOOOOOOOOOOOOOOOOXX |
| | fUmG*mU*mU | GUU | |
| WV-38229 | fU*fU*mUfCmCfUmUfCmUfGmGmUmUfCmAfGmU | UUUCCUUCUGGUUCAGUCC | XXOOOOOOOOOOOOOOOOXX |
| | fCmC*mU*mU | UU | |
| WV-38230 | fU*fC*mUfUmCfCmUfUmCfUmGmGmUfUmCfAmGf | UCUUCCUUCUGGUUCAGUC | XXOOOOOOOOOOOOOOOOXX |
| | UmC*mU*mU | UU | |
| WV-38231 | fU*fC*mUfGmUfCmCfUmCfUmUmCmCfUmUfCmUf | UCUGUCCUCUUCCUUCUGG | XXOOOOOOOOOOOOOOOOXX |
| | GmG*mU*mU | UU | |
| WV-38232 | fU*fG*mCfUmCfUmGfUmCfCmUmCmUfUmCfCmUf | UGCUCUGUCCUCUUCCUUC | XXOOOOOOOOOOOOOOOOXX |
| | UmC*mU*mU | UU | |
| WV-38233 | fU*fU*mUfGmCfUmCfUmGfUmCmCmUfCmUfUmCf | UUUGCUCUGUCCUCUUCCU | XXOOOOOOOOOOOOOOOOXX |
| | CmU*mU*mU | UU | |
| WV-38234 | fU*fU*mUfUmGfCmUfCmUfGmUmCmCfUmCfUmU | UUUUGCUCUGUCCUCUUCC | XXOOOOOOOOOOOOOOOOXX |
| | fCmC*mU*mU | UU | |
| WV-38235 | fU*fG*mGfCmUfUmUfGmCfUmCmUmGfUmCfCmU | UGGCUUUGCUCUGUCCUC | XXOOOOOOOOOOOOOOOOXX |
| | fCmU*mU*mU | UUU | |
| WV-38236 | fU*fU*mGfGmCfUmUfUmGfCmUmCmUfGmUfCmC | UUGGCUUUGCUCUGUCCU | XXOOOOOOOOOOOOOOOOXX |
| | fUmC*mU*mU | CUU | |
| WV-38237 | fU*fC*mAfUmGfGmCfUmUfUmGmCmUfCmUfGmU | UCAUGGCUUUGCUCUGUCC | XXOOOOOOOOOOOOOOOOXX |
| | fCmC*mU*mU | UU | |
| WV-38238 | fU*fU*mCfAmUfGmGfCmUfUmUmGmCfUmCfUmG | UUCAUGGCUUUGCUCUGU | XXOOOOOOOOOOOOOOOOXX |
| | fUmC*mU*mU | CUU | |
| WV-38239 | fU*fU*mGfUmUfCmAfUmGfGmCmUmUfUmGfCmU | UUGUUCAUGGCUUUGCUC | XXOOOOOOOOOOOOOOOOXX |
| | fCmU*mU*mU | UUU | |
| WV-38240 | fU*fG*mAfUmGfUmUfCmAfUmGmGmCfUmUfUmG | UGAUGUUCAUGGCUUUGC | XXOOOOOOOOOOOOOOOOXX |
| | fCmU*mU*mU | UUU | |
| WV-38241 | fU*fU*mGfAmUfGmUfUmCfAmUmGmGfCmUfUmU | UUGAUGUUCAUGGCUUUG | XXOOOOOOOOOOOOOOOOXX |
| | fGmC*mU*mU | CUU | |
| WV-38242 | fU*fA+mGfGmAfUmGfAmUfGmUmUmCfAmUfGmG | UAGGAUGAUGUUCAUGGC | XXOOOOOOOOOOOOOOOOXX |
| | fCmU*mU*mU | UUU | |
| WV-38243 | fU*fC*mUfAmGfGmAfUmGfAmUmGmUfUmCfAmU | UCUAGGAUGAUGUUCAUG | XXOOOOOOOOOOOOOOOOXX |
| | fGmG*mU*mU | GUU | |
| WV-38244 | fU*fU*mCfUmAfGmGfAmUfGmAmUmGfUmUfCmA | UUCUAGGAUGAUGUUCAU | XXOOOOOOOOOOOOOOOOXX |
| | fUmG*mU*mU | GUU | |
| WV-38245 | fU*fU*mUfCmUfAmGfGmAfUmGmAmUfGmUfUmC | UUUCUAGGAUGAUGUUCA | XXOOOOOOOOOOOOOOOOXX |
| | fAmU*mU*mU | UUU | |
| WV-38246 | fU*fU*mUfUmCfUmAfGmGfAmUmGmAfUmGfUmU | UUUUCUAGGAUGAUGUUC | XXOOOOOOOOOOOOOOOOXX |
| | fCmA*mU*mU | AUU | |
| WV-38247 | fU*fA*mUfUmUfCmUfAmGfGmAmUmGfAmUfGmU | UAUUUCUAGGAUGAUGUU | XXOOOOOOOOOOOOOOOOXX |
| | fUmC*mU*mU | CUU | |
| WV-38248 | fU*fA*mGfGmAfUmUfUmCfUmAmGmGfAmUfGmA | UAGGAUUUCUAGGAUGAU | XXOOOOOOOOOOOOOOOOXX |
| | fUmG*mU*mU | GUU | |
| WV-38249 | fU*fA*mGfCmAfGmAfAmGfGmAmUmUfUmCfUmAf | UAGCAGAAGGAUUUCUAG | XXOOOOOOOOOOOOOOOOXX |
| | GmG*mU*mU | GUU | |
| WV-38250 | fU*fG*mAfAmGfCmAfGmAfAmGmGmAfUmUfUmCf | UGAAGCAGAAGGAUUUCU | XXOOOOOOOOOOOOOOOOXX |
| | UmA*mU*mU | AUU | |
| WV-38251 | fU*fC*mAfGmAfAmGfCmAfGmAmAmGfGmAfUmUf | UCAGAAGCAGAAGGAUUUC | XXOOOOOOOOOOOOOOOOXX |
| | UmC*mU*mU | UU | |
| WV-38252 | fU*fU*mCfAmGfAmAfGmCfAmGmAmAfGmGfAmUf | UUCAGAAGCAGAAGGAUU | XXOOOOOOOOOOOOOOOOXX |
| | UmU*mU*mU | UUU | |
| WV-38253 | fU*fG*mAfUmCfAmGfAmAfGmCmAmGfAmAfGmGf | UGAUCAGAAGCAGAAGGAU | XXOOOOOOOOOOOOOOOOXX |
| | AmU*mU*mU | UU | |
| WV-38254 | fU*fG*mGfUmGfAmUfCmAfGmAmAmGfCmAfGmAf | UGGUGAUCAGAAGCAGAAG | XXOOOOOOOOOOOOOOOOXX |
| | AmG*mU*mU | UU | |
| WV-38255 | fU*fG*mAfUmGfGmUfGmAfUmCmAmGfAmAfGmC | UGAUGGUGAUCAGAAGCA | XXOOOOOOOOOOOOOOOOXX |
| | fAmG*mU*mU | GUU | |
| WV-38256 | fU*fU*mGfAmUfGmGfUmGfAmUmCmAfGmAfAmG | UUGAUGGUGAUCAGAAGC | XXOOOOOOOOOOOOOOOOXX |
| | fCmA*mU*mU | AUU | |
| WV-38257 | fU*fA*mUfGmAfUmGfGmUfGmAmUmCfAmGfAmA | UAUGAUGGUGAUCAGAAG | XXOOOOOOOOOOOOOOOOXX |
| | fGmC*mU*mU | CUU | |
| WV-38258 | fU*fA*mGfAmUfGmAfUmGfGmUmGmAfUmCfAmG | UAGAUGAUGGUGAUCAGA | XXOOOOOOOOOOOOOOOOXX |
| | fAmA*mU*mU | AUU | |
| WV-38259 | fU*fA*mGfGmAfGmUfAmGfAmUmGmAfUmGfGmU | UAGGAGUAGAUGAUGGUG | XXOOOOOOOOOOOOOOOOXX |
| | fGmA*mU*mU | AUU | |
| WV-38260 | fU*fA*mGfUmAfGmGfAmGfUmAmGmAfUmGfAmU | UAGUAGGAGUAGAUGAUG | XXOOOOOOOOOOOOOOOOXX |
| | fGmG*mU*mU | GUU | |
| WV-38261 | fU*fA*mAfGmUfAmGfGmAfGmUmAmGfAmUfGmA | UAAGUAGGAGUAGAUGAU | XXOOOOOOOOOOOOOOOOXX |
| | fUmG*mU*mU | GUU | |
| WV-38262 | fU*fC*mCfAmAfGmUfAmGfGmAmGmUfAmGfAmUf | UCCAAGUAGGAGUAGAUGA | XXOOOOOOOOOOOOOOOOXX |
| | GmA*mU*mU | UU | |
| WV-38263 | fU*fA*mCfGmAfCmUfCmCfAmAmGmUfAmGfGmAf | UACGACUCCAAGUAGGAGU | XXOOOOOOOOOOOOOOOOXX |
| | GmU*mU*mU | UU | |
| WV-38264 | fU*fC*mCfAmAfCmGfAmCfUmCmCmAfAmGfUmAf | UCCAACGACUCCAAGUAGG | XXOOOOOOOOOOOOOOOOXX |
| | GmG*mU*mU | UU | |
| WV-38265 | fU*fC*mUfGmAfGmGfAmAfUmGmAmAfAmAfAmCf | UCUGAGGAAUGAAAAACUU | XXOOOOOOOOOOOOOOOOXX |
| | UmU*mU*mU | UU | |
| WV-38266 | fU*fU*mUfUmCfUmCfCmUfCmUmGmAfGmGfAmAf | UUUUCUCCUCUGAGGAAU | XXOOOOOOOOOOOOOOOOXX |
| | UmG*mU*mU | GUU | |
| WV-38267 | fU*fC*mAfGmAfUmUfUmUfCmUmCmCfUmCfUmGf | UCAGAUUUUCUCCUCUGAG | XXOOOOOOOOOOOOOOOOXX |
| | AmG*mU*mU | UU | |
| WV-38268 | fU*fU*mAfAmUfGmAfGmAfAmCmAmAfUmCfUmCf | UUAAUGAGAACAAUCUCCC | XXOOOOOOOOOOOOOOOOXX |
| | CmC*mU*mU | UU | |
| WV-38269 | fU*fG*mUfAmAfUmGfAmGfAmAmCmAfAmUfCmUf | UGUAAUGAGAACAAUCUCC | XXOOOOOOOOOOOOOOOOXX |
| | CmC*mU*mU | UU | |
| WV-38270 | fU*fA*mGfUmAfAmUfGmAfGmAmAmCfAmAfUmCf | UAGUAAUGAGAACAAUCUC | XXOOOOOOOOOOOOOOOOXX |
| | UmC*mU*mU | UU | |
| WV-38271 | fU*fC*mCfAmGfUmAfAmUfGmAmGmAfAmCfAmAf | UCCAGUAAUGAGAACAAUC | XXOOOOOOOOOOOOOOOOXX |
| | UmC*mU*mU | UU | |
| WV-38272 | fU*fA*mGfUmCfUmGfCmCfUmGmCmCfUmAfUmUf | UAGUCUGCCUGCCUAUUCC | XXOOOOOOOOOOOOOOOOXX |
| | CmC*mU*mU | UU | |
| WV-38273 | fU*fU*mAfGmUfCmUfGmCfCmUmGmCfCmUfAmUf | UUAGUCUGCCUGCCUAUUC | XXOOOOOOOOOOOOOOOOXX |
| | UmC*mU*mU | UU | |
| WV-38274 | fU*fU*mUfAmAfUmAfUmCfCmCmAmCfAmGfAmAf | UUUAAUAUCCCACAGAACC | XXOOOOOOOOOOOOOOOOXX |
| | CmC*mU*mU | UU | |
| WV-38275 | fU*fC*mAfCmCfCmAfCmUfUmCmUmUfUmCfUmUf | UCACCCACUUCUUUCUUCA | XXOOOOOOOOOOOOOOOOXX |
| | CmA*mU*mU | UU | |
| WV-38276 | fU*fU*mCfAmCfCmCfAmCfUmUmCmUfUmUfCmUf | UUCACCCACUUCUUUCUUC | XXOOOOOOOOOOOOOOOOXX |
| | UmC*mU*mU | UU | |
| WV-38277 | fU*fA*mCfAmUfCmAfCmCfCmAmCmUfUmCfUmUf | UACAUCACCCACUUCUUUC | XXOOOOOOOOOOOOOOOOXX |
| | UmC*mU*mU | UU | |
| WV-38278 | fU*fU*mAfCmAfUmCfAmCfCmCmAmCfUmUfCmUf | UUACAUCACCCACUUCUUU | XXOOOOOOOOOOOOOOOOXX |
| | UmU*mU*mU | UU | |
| WV-38279 | fU*fG*mUfUmAfCmAfUmCfAmCmCmCfAmCfUmUf | UGUUACAUCACCCACUUCU | XXOOOOOOOOOOOOOOOOXX |
| | CmU*mU*mU | UU | |
| WV-38280 | fU*fU*mGfUmUfAmCfAmUfCmAmCmCfCmAfCmUf | UUGUUACAUCACCCACUUC | XXOOOOOOOOOOOOOOOOXX |
| | UmC*mU*mU | UU | |
| WV-38281 | fU*fU*mUfGmUfUmAfCmAfUmCmAmCfCmCfAmCf | UUUGUUACAUCACCCACUU | XXOOOOOOOOOOOOOOOOXX |
| | UmU*mU*mU | UU | |
| WV-38282 | fU*fC*mAfCmCfAmCfGmAfUmUmGmUfUmAfCmAf | UCACCACGAUUGUUACAUC | XXOOOOOOOOOOOOOOOOXX |
| | UmC*mU*mU | UU | |
| WV-38283 | fU*fA*mUfUmCfAmCfCmAfCmGmAmUfUmGfUmUf | UAUUCACCACGAUUGUUAC | XXOOOOOOOOOOOOOOOOXX |
| | AmC*mU*mU | UU | |
| WV-38284 | fU*fU*mAfUmUfCmAfCmCfAmCmGmAfUmUfGmUf | UUAUUCACCACGAUUGUUA | XXOOOOOOOOOOOOOOOOXX |
| | UmA*mU*mU | UU | |
| WV-38285 | fU*fG*mUfCmCfCmAfGmCfAmUmUmAfUmUfCmAf | UGUCCCAGCAUUAUUCACC | XXOOOOOOOOOOOOOOOOXX |
| | CmC*mU*mU | UU | |
| WV-38286 | fU*fA*mCfUmGfUmCfCmCfAmGmCmAfUmUfAmUf | UACUGUCCCAGCAUUAUUC | XXOOOOOOOOOOOOOOOOXX |
| | UmC*mU*mU | UU | |
| WV-38287 | fU*fU*mAfCmUfGmUfCmCfCmAmGmCfAmUfUmAf | UUACUGUCCCAGCAUUAUU | XXOOOOOOOOOOOOOOOOXX |
| | UmU*mU*mU | UU | |
| WV-38288 | fU*fA*mUfAmCfUmGfUmCfCmCmAmGfCmAfUmUf | UAUACUGUCCCAGCAUUAU | XXOOOOOOOOOOOOOOOOXX |
| | AmU*mU*mU | UU | |
| WV-38289 | fU*fC*mGfGmCfUmGfGmAfUmAmUmAfCmUfGmU | UCGGCUGGAUAUACUGUCC | XXOOOOOOOOOOOOOOOOXX |
| | fCmC*mU*mU | UU | |
| WV-38290 | fU*fU*mCfGmGfCmUfGmGfAmUmAmUfAmCfUmG | UUCGGCUGGAUAUACUGU | XXOOOOOOOOOOOOOOOOXX |
| | fUmC*mU*mU | CUU | |
| WV-38291 | fU*fG*mAfUmCfGmGfCmUfGmGmAmUfAmUfAmCf | UGAUCGGCUGGAUAUACU | XXOOOOOOOOOOOOOOOOXX |
| | UmG*mU*mU | GUU | |
| WV-38292 | fU*fA*mGfAmUfCmGfGmCfUmGmGmAfUmAfUmA | UAGAUCGGCUGGAUAUAC | XXOOOOOOOOOOOOOOOOXX |
| | fCmU*mU*mU | UUU | |
| WV-38293 | fU*fU*mCfUmCfUmUfCmAfUmCmCmUfUmGfGmUf | UUCUCUUCAUCCUUGGUGC | XXOOOOOOOOOOOOOOOOXX |
| | GmC*mU*mU | UU | |
| WV-38294 | fU*fA*mUfCmUfCmUfUmCfAmUmCmCfUmUfGmGf | UAUCUCUUCAUCCUUGGU | XXOOOOOOOOOOOOOOOOXX |
| | UmG*mU*mU | GUU | |
| WV-38295 | fU*fA*mAfUmCfUmCfUmUfCmAmUmCfCmUfUmGf | UAAUCUCUUCAUCCUUGGU | XXOOOOOOOOOOOOOOOOXX |
| | GmU*mU*mU | UU | |
| WV-38296 | fU*fG*mGfUmAfAmUfCmUfCmUmUmCfAmUfCmCf | UGGUAAUCUCUUCAUCCUU | XXOOOOOOOOOOOOOOOOXX |
| | UmU*mU*mU | UU | |
| WV-38297 | fU*fU*mGfGmUfAmAfUmCfUmCmUmUfCmAfUmCf | UUGGUAAUCUCUUCAUCCU | XXOOOOOOOOOOOOOOOOXX |
| | CmU*mU*mU | UU | |
| WV-38298 | fU*fG*mGfAmUfGmUfUmGfAmCmCmUfCmAfAmAf | UGGAUGUUGACCUCAAAU | XXOOOOOOOOOOOOOOOOXX |
| | UmG*mU*mU | GUU | |
| WV-38299 | fU*fA*mGfGmAfUmGfUmUfGmAmCmCfUmCfAmAf | UAGGAUGUUGACCUCAAAU | XXOOOOOOOOOOOOOOOOXX |
| | AmU*mU*mU | UU | |
| WV-38300 | fU*fG*mAfUmCfCmAfAmAfAmAmUmGfUmCfCmUf | UGAUCCAAAAAUGUCCUAG | XXOOOOOOOOOOOOOOOOXX |
| | AmG*mU*mU | UU | |
| WV-38301 | fU*fG*mUfGmAfUmCfCmAfAmAmAmAfUmGfUmCf | UGUGAUCCAAAAAUGUCCU | XXOOOOOOOOOOOOOOOOXX |
| | CmU*mU*mU | UU | |
| WV-38302 | fU*fU*mGfUmGfAmUfCmCfAmAmAmAfAmUfGmUf | UUGUGAUCCAAAAAUGUCC | XXOOOOOOOOOOOOOOOOXX |
| | CmC*mU*mU | UU | |
| WV-38303 | fU*fU*mUfGmUfGmAfUmCfCmAmAmAfAmAfUmGf | UUUGUGAUCCAAAAAUGUC | XXOOOOOOOOOOOOOOOOXX |
| | UmC*mU*mU | UU | |
| WV-38304 | fU*fU*mUfUmGfUmGfAmUfCmCmAmAfAmAfAmUf | UUUUGUGAUCCAAAAAUG | XXOOOOOOOOOOOOOOOOXX |
| | GmU*mU*mU | UUU | |
| WV-38305 | fU*fG*mAfAmGfUmGfCmUfUmUmUmGfUmGfAmU | UGAAGUGCUUUUGUGAUC | XXOOOOOOOOOOOOOOOOXX |
| | fCmC*mU*mU | CUU | |
| WV-38306 | fU*fA*mGfAmAfGmUfGmCfUmUmUmUfGmUfGmA | UAGAAGUGCUUUUGUGAU | XXOOOOOOOOOOOOOOOOXX |
| | fUmC*mU*mU | CUU | |
| WV-38307 | fU*fG*mGfAmAfGmAfAmGfUmGmCmUfUmUfUmG | UGGAAGAAGUGCUUUUGU | XXOOOOOOOOOOOOOOOOXX |
| | fUmG*mU*mU | GUU | |
| WV-38308 | fU*fU*mGfGmAfAmGfAmAfGmUmGmCfUmUfUmU | UUGGAAGAAGUGCUUUUG | XXOOOOOOOOOOOOOOOOXX |
| | fGmU*mU*mU | UUU | |
| WV-38309 | fU*fC*mGfAmUfGmGfAmAfGmAmAmGfUmGfCmU | UCGAUGGAAGAAGUGCUU | XXOOOOOOOOOOOOOOOOXX |
| | fUmU*mU*mU | UUU | |
| WV-38310 | fU*fG*mUfGmGfCmCfAmUfGmAmUmUfUmCfUmC | UGUGGCCAUGAUUUCUCU | XXOOOOOOOOOOOOOOOOXX |
| | fUmC*mU*mU | CUU | |
| WV-38311 | fU*fU*mGfCmUfGmGfAmAfCmAmAmUfAmUfGmG | UUGCUGGAACAAUAUGGG | XXOOOOOOOOOOOOOOOOXX |
| | fGmA*mU*mU | AUU | |
| WV-38312 | fU*fU*mUfGmCfUmGfGmAfAmCmAmAfUmAfUmG | UUUGCUGGAACAAUAUGG | XXOOOOOOOOOOOOOOOOXX |
| | fGmG*mU*mU | GUU | |
| WV-38313 | fU*fU*mUfUmGfCmUfGmGfAmAmCmAfAmUfAmU | UUUUGCUGGAACAAUAUG | XXOOOOOOOOOOOOOOOOXX |
| | fGmG*mU*mU | GUU | |
| WV-38314 | fU*fA*mUfUmUfGmCfUmGfGmAmAmCfAmAfUmAf | UAUUUGCUGGAACAAUAU | XXOOOOOOOOOOOOOOOOXX |
| | UmG*mU*mU | GUU | |
| WV-38315 | fU*fA*mAfUmUfUmGfCmUfGmGmAmAfCmAfAmUf | UAAUUUGCUGGAACAAUA | XXOOOOOOOOOOOOOOOOXX |
| | AmU*mU*mU | UUU | |
| WV-38316 | fU*fG*mUfGmAfAmAfGmCfCmAmAmCfAmGfCmGf | UGUGAAAGCCAACAGCGGC | XXOOOOOOOOOOOOOOOOXX |
| | GmC*mU*mU | UU | |
| WV-38317 | fU*fC*mUfGmUfGmAfAmAfGmCmCmAfAmCfAmGf | UCUGUGAAAGCCAACAGCG | XXOOOOOOOOOOOOOOOOXX |
| | CmG*mU*mU | UU | |
| WV-38318 | fU*fC*mAfGmAfCmCfUmCfUmGmUmGfAmAfAmGf | UCAGACCUCUGUGAAAGCC | XXOOOOOOOOOOOOOOOOXX |
| | CmC*mU*mU | UU | |
| WV-38319 | fU*fG*mUfCmAfGmAfCmCfUmCmUmGfUmGfAmAf | UGUCAGACCUCUGUGAAAG | XXOOOOOOOOOOOOOOOOXX |
| | AmG*mU*mU | UU | |
| WV-38320 | fU*fC*mUfGmAfUmGfUmCfAmGmAmCfCmUfCmUf | UCUGAUGUCAGACCUCUGU | XXOOOOOOOOOOOOOOOOXX |
| | GmU*mU*mU | UU | |
| WV-38321 | fU*fU*mCfUmGfAmUfGmUfCmAmGmAfCmCfUmCf | UUCUGAUGUCAGACCUCUG | XXOOOOOOOOOOOOOOOOXX |
| | UmG*mU*mU | UU | |
| WV-38322 | fU*fG*mAfAmGfUmUfCmUfGmAmUmGfUmCfAmG | UGAAGUUCUGAUGUCAGA | XXOOOOOOOOOOOOOOOOXX |
| | fAmC*mU*mU | CUU | |
| WV-38323 | fU*fA*mCfCmAfGmUfUmUfUmUmCmCfCmAfAmGf | UACCAGUUUUUCCCAAGGC | XXOOOOOOOOOOOOOOOOXX |
| | GmC*mU*mU | UU | |
| WV-38324 | fU*fU*mUfGmAfUmAfCmCfAmGmUmUfUmUfUmC | UUUGAUACCAGUUUUUCCC | XXOOOOOOOOOOOOOOOOXX |
| | fCmC*mU*mU | UU | |
| WV-38325 | fU+fU*mUfUmGfAmUfAmCfCmAmGmUfUmUfUmU | UUUUGAUACCAGUUUUUC | XXOOOOOOOOOOOOOOOOXX |
| | fCmC*mU*mU | CUU | |
| WV-38326 | fU*fG*mAfGmGfUmUfUmUfGmAmUmAfCmCfAmG | UGAGGUUUUGAUACCAGU | XXOOOOOOOOOOOOOOOOXX |
| | fUmU*mU*mU | UUU | |
| WV-38327 | fU*fG*mAfCmAfUmGfAmGfGmUmUmUfUmGfAmU | UGACAUGAGGUUUUGAUA | XXOOOOOOOOOOOOOOOOXX |
| | fAmC*mU*mU | CUU | |
| WV-38328 | fU*fU*mGfGmUfGmAfAmCfCmCmAmGfUmAfUmUf | UUGGUGAACCCAGUAUUCA | XXOOOOOOOOOOOOOOOOXX |
| | CmA*mU*mU | UU | |
| WV-38329 | fU*fU*mUfGmGfUmGfAmAfCmCmCmAfGmUfAmUf | UUUGGUGAACCCAGUAUUC | XXOOOOOOOOOOOOOOOOXX |
| | UmC*mU*mU | UU | |
| WV-38330 | fU*fU*mUfUmGfGmUfGmAfAmCmCmCfAmGfUmAf | UUUUGGUGAACCCAGUAU | XXOOOOOOOOOOOOOOOOXX |
| | UmU*mU*mU | UUU | |
| WV-38331 | fU*fU*mUfUmUfGmGfUmGfAmAmCmCfCmAfGmU | UUUUUGGUGAACCCAGUA | XXOOOOOOOOOOOOOOOOXX |
| | fAmU*mU*mU | UUU | |
| WV-38332 | fU*fU*mGfGmAfUmUfUmUfUmGmGmUfGmAfAmC | UUGGAUUUUUGGUGAACC | XXOOOOOOOOOOOOOOOOXX |
| | fCmC*mU*mU | CUU | |
| WV-38333 | fU*fC*mUfUmGfUmGfCmUfUmGmGmAfUmUfUmU | UCUUGUGCUUGGAUUUUU | XXOOOOOOOOOOOOOOOOXX |
| | fUmG*mU*mU | GUU | |
| WV-38334 | fU*fA*mAfUmCfUmUfGmUfGmCmUmUfGmGfAmU | UAAUCUUGUGCUUGGAUU | XXOOOOOOOOOOOOOOOOXX |
| | fUmU*mU*mU | UUU | |
| WV-38335 | fU*fU*mAfAmUfCmUfUmGfUmGmCmUfUmGfGmA | UUAAUCUUGUGCUUGGAU | XXOOOOOOOOOOOOOOOOXX |
| | fUmU*mU*mU | UUU | |
| WV-38336 | fU*fA*mCfAmGfGmCfCmAfUmAmAmUfCmUfUmGf | UACAGGCCAUAAUCUUGUG | XXOOOOOOOOOOOOOOOOXX |
| | UmG*mU*mU | UU | |
| WV-38337 | fU*fU*mAfCmAfGmGfCmCfAmUmAmAfUmCfUmUf | UUACAGGCCAUAAUCUUGU | XXOOOOOOOOOOOOOOOOXX |
| | GmU*mU*mU | UU | |
| WV-38338 | fU*fA*mUfAmCfAmGfGmCfCmAmUmAfAmUfCmUf | UAUACAGGCCAUAAUCUUG | XXOOOOOOOOOOOOOOOOXX |
| | UmG*mU*mU | UU | |
| WV-38339 | fU*fC*mCfAmAfUmAfCmAfGmGmCmCfAmUfAmAf | UCCAAUACAGGCCAUAAUC | XXOOOOOOOOOOOOOOOOXX |
| | UmC*mU*mU | UU | |
| WV-38340 | fU*fC*mUfGmUfCmUfCmCfAmAmUmAfCmAfGmGf | UCUGUCUCCAAUACAGGCC | XXOOOOOOOOOOOOOOOOXX |
| | CmC*mU*mU | UU | |
| WV-38341 | fU*fC*mAfUmCfUmGfUmCfUmCmCmAfAmUfAmCf | UCAUCUGUCUCCAAUACAG | XXOOOOOOOOOOOOOOOOXX |
| | AmG*mU*mU | UU | |
| WV-38342 | fU*fU*mCfAmUfCmUfGmUfCmUmCmCfAmAfUmAf | UUCAUCUGUCUCCAAUACA | XXOOOOOOOOOOOOOOOOXX |
| | CmA*mU*mU | UU | |
| WV-38343 | fU*fA*mCfGmAfCmUfUmCfAmUmCmUfGmUfCmUf | UACGACUUCAUCUGUCUCC | XXOOOOOOOOOOOOOOOOXX |
| | CmC*mU*mU | UU | |
| WV-38344 | fU*fU*mAfCmGfAmCfUmUfCmAmUmCfUmGfUmCf | UUACGACUUCAUCUGUCUC | XXOOOOOOOOOOOOOOOOXX |
| | UmC*mU*mU | UU | |
| WV-38345 | fU*fC*mUfUmAfCmGfAmCfUmUmCmAfUmCfUmGf | UCUUACGACUUCAUCUGUC | XXOOOOOOOOOOOOOOOOXX |
| | UmC*mU*mU | UU | |
| WV-38346 | fU*fU*mCfUmUfAmCfGmAfCmUmUmCfAmUfCmUf | UUCUUACGACUUCAUCUGU | XXOOOOOOOOOOOOOOOOXX |
| | GmU*mU*mU | UU | |
| WV-38347 | fU*fC*mUfUmCfUmUfAmCfGmAmCmUfUmCfAmUf | UCUUCUUACGACUUCAUCU | XXOOOOOOOOOOOOOOOOXX |
| | CmU*mU*mU | UU | |
| WV-38348 | fU*fC*mAfGmAfCmUfUmCfUmUmAmCfGmAfCmUf | UCAGACUUCUUACGACUUC | XXOOOOOOOOOOOOOOOOXX |
| | UmC*mU*mU | UU | |
| WV-38349 | fU*fA*mUfCmAfGmAfCmUfUmCmUmUfAmCfGmAf | UAUCAGACUUCUUACGACU | XXOOOOOOOOOOOOOOOOXX |
| | CmU*mU*mU | UU | |
| WV-38350 | fU*fU*mCfUmAfUmCfAmGfAmCmUmUfCmUfUmAf | UUCUAUCAGACUUCUUACG | XXOOOOOOOOOOOOOOOOXX |
| | CmG*mU*mU | UU | |
| WV-38351 | fU*fC*mCfAmUfCmUfAmUfCmAmGmAfCmUfUmCf | UCCAUCUAUCAGACUUCUU | XXOOOOOOOOOOOOOOOOXX |
| | UmU*mU*mU | UU | |
| WV-38352 | fU*fU*mCfCmAfUmCfUmAfUmCmAmGfAmCfUmUf | UUCCAUCUAUCAGACUUCU | XXOOOOOOOOOOOOOOOOXX |
| | CmU*mU*mU | UU | |
| WV-38353 | fU*fU*mUfCmCfAmUfCmUfAmUmCmAfGmAfCmUf | UUUCCAUCUAUCAGACUUC | XXOOOOOOOOOOOOOOOOXX |
| | UmC*mU*mU | UU | |
| WV-38354 | fU*fA*mUfUmCfCmAfUmCfUmAmUmCfAmGfAmCf | UAUUCCAUCUAUCAGACUU | XXOOOOOOOOOOOOOOOOXX |
| | UmU*mU*mU | UU | |
| WV-38355 | fU*fA*mGfUmAfUmUfCmCfAmUmCmUfAmUfCmAf | UAGUAUUCCAUCUAUCAGA | XXOOOOOOOOOOOOOOOOXX |
| | GmA*mU*mU | UU | |
| WV-38356 | fU*fA*mAfGmUfAmUfUmCfCmAmUmCfUmAfUmCf | UAAGUAUUCCAUCUAUCAG | XXOOOOOOOOOOOOOOOOXX |
| | AmG*mU*mU | UU | |
| WV-38357 | fU*fU*mGfGmUfAmAfGmUfAmUmUmCfCmAfUmC | UUGGUAAGUAUUCCAUCU | XXOOOOOOOOOOOOOOOOXX |
| | fUmA*mU*mU | AUU | |
| WV-38358 | fU*fU*mUfGmGfUmAfAmGfUmAmUmUfCmCfAmU | UUUGGUAAGUAUUCCAUC | XXOOOOOOOOOOOOOOOOXX |
| | fCmU*mU*mU | UUU | |
| WV-38359 | fU*fA*mUfUmGfGmUfAmAfGmUmAmUfUmCfCmA | UAUUGGUAAGUAUUCCAU | XXOOOOOOOOOOOOOOOOXX |
| | fUmC*mU*mU | CUU | |
| WV-38360 | fU*fU*mAfUmUfGmGfUmAfAmGmUmAfUmUfCmC | UUAUUGGUAAGUAUUCCA | XXOOOOOOOOOOOOOOOOXX |
| | fAmU*mU*mU | UUU | |
| WV-38361 | fU*fC*mUfUmAfUmUfGmGfUmAmAmGfUmAfUmU | UCUUAUUGGUAAGUAUUC | XXOOOOOOOOOOOOOOOOXX |
| | fCmC*mU*mU | CUU | |
| WV-38362 | fU*fU*mCfUmUfAmUfUmGfGmUmAmAfGmUfAmU | UUCUUAUUGGUAAGUAUU | XXOOOOOOOOOOOOOOOOXX |
| | fUmC*mU*mU | CUU | |
| WV-38363 | fU*fU*mUfCmUfUmAfUmUfGmGmUmAfAmGfUmA | UUUCUUAUUGGUAAGUAU | XXOOOOOOOOOOOOOOOOXX |
| | fUmU*mU*mU | UUU | |
| WV-38364 | fU*fA*mAfAmUfCmAfUmUfUmUmCmUfUmAfUmU | UAAAUCAUUUUCUUAUUG | XXOOOOOOOOOOOOOOOOXX |
| | fGmG*mU*mU | GUU | |
| WV-38365 | fU*fA*mAfAmAfUmCfAmUfUmUmUmCfUmUfAmU | UAAAAUCAUUUUCUUAUU | XXOOOOOOOOOOOOOOOOXX |
| | fUmG*mU*mU | GUU | |
| WV-38366 | fU*fG*mGfAmAfCmAfAmAfAmAmUmCfAmUfUmUf | UGGAACAAAAAUCAUUUUC | XXOOOOOOOOOOOOOOOOXX |
| | UmC*mU*mU | UU | |
| WV-38367 | fU*fU*mUfCmAfUmUfUmCfAmUmUmUfUmGfAmU | UUUCAUUUCAUUUUGAUU | XXOOOOOOOOOOOOOOOOXX |
| | fUmU*mU*mU | UUU | |
| WV-38368 | fU*fA*mUfCmAfUmUfAmUfCmAmUmGfCmAfUmAf | UAUCAUUAUCAUGCAUACA | XXOOOOOOOOOOOOOOOOXX |
| | CmA*mU*mU | UU | |
| WV-38369 | fU*fG*mCfUmUfUmGfCmAfGmCmAmUfUmGfAmU | UGCUUUGCAGCAUUGAUU | XXOOOOOOOOOOOOOOOOXX |
| | fUmC*mU*mU | CUU | |
| WV-38370 | fU*fA*mGfCmUfUmUfGmCfAmGmCmAfUmUfGmAf | UAGCUUUGCAGCAUUGAU | XXOOOOOOOOOOOOOOOOXX |
| | UmU*mU*mU | UUU | |
| WV-38371 | fU*fG*mAfCmAfGmGfUmAfAmUmUmAfAmUfCmUf | UGACAGGUAAUUAAUCUU | XXOOOOOOOOOOOOOOOOXX |
| | UmG*mU*mU | GUU | |
| WV-38372 | fU*fU*mGfAmGfAmAfAmCfAmGmGmAfAmGfAmCf | UUGAGAAACAGGAAGACAG | XXOOOOOOOOOOOOOOOOXX |
| | AmG*mU*mU | UU | |
| WV-38373 | fU*fU*mCfUmUfGmAfGmAfAmAmCmAfGmGfAmAf | UUCUUGAGAAACAGGAAGA | XXOOOOOOOOOOOOOOOOXX |
| | GmA*mU*mU | UU | |
| WV-38374 | fU*fU*mUfCmUfUmGfAmGfAmAmAmCfAmGfGmAf | UUUCUUGAGAAACAGGAA | XXOOOOOOOOOOOOOOOOXX |
| | AmG*mU*mU | GUU | |
| WV-38375 | fU*fU*mAfUmUfCmUfUmGfAmGmAmAfAmCfAmGf | UUAUUCUUGAGAAACAGG | XXOOOOOOOOOOOOOOOOXX |
| | GmA*mU*mU | AUU | |
| WV-38376 | fU*fA*mUfAmUfUmCfUmUfGmAmGmAfAmAfCmAf | UAUAUUCUUGAGAAACAG | XXOOOOOOOOOOOOOOOOXX |
| | GmG*mU*mU | GUU | |
| WV-38377 | fU*fG*mAfAmAfGmGfAmAfAmAmAmCfAmGfAmCf | UGAAAGGAAAAACAGACCU | XXOOOOOOOOOOOOOOOOXX |
| | CmU*mU*mU | UU | |
| WV-38378 | fU*fU*mGfAmAfAmGfGmAfAmAmAmAfCmAfGmAf | UUGAAAGGAAAAACAGACC | XXOOOOOOOOOOOOOOOOXX |
| | CmC*mU*mU | UU | |
| WV-38379 | fU*fA*mUfGmUfUmUfAmUfGmUmAmAfGmCfAmC | UAUGUUUAUGUAAGCACA | XXOOOOOOOOOOOOOOOOXX |
| | fAmG*mU*mU | GUU | |
| WV-38380 | fU*fA*mAfGmUfAmUfGmUfUmUmAmUfGmUfAmA | UAAGUAUGUUUAUGUAAG | XXOOOOOOOOOOOOOOOOXX |
| | fGmC*mU*mU | CUU | |
| WV-38381 | fU*fU*mAfAmGfUmAfUmGfUmUmUmAfUmGfUmA | UUAAGUAUGUUUAUGUAA | XXOOOOOOOOOOOOOOOOXX |
| | fAmG*mU*mU | GUU | |
| WV-38382 | fU*fA*mAfAmGfAmAfAmAfCmCmUmUfUmUfAmAf | UAAAGAAAACCUUUUAAGU | XXOOOOOOOOOOOOOOOOXX |
| | GmU*mU*mU | UU | |
| WV-38383 | fU*fU*mAfAmAfGmAfAmAfAmCmCmUfUmUfUmAf | UUAAAGAAAACCUUUUAAG | XXOOOOOOOOOOOOOOOOXX |
| | AmG*mU*mU | UU | |
| WV-38384 | fU*fA*mUfCmUfUmAfAmAfGmAmAmAfAmCfCmUf | UAUCUUAAAGAAAACCUUU | XXOOOOOOOOOOOOOOOOXX |
| | UmU*mU*mU | UU | |
| WV-38385 | fU*fA*mUfAmUfCmUfUmAfAmAmGmAfAmAfAmCf | UAUAUCUUAAAGAAAACCU | XXOOOOOOOOOOOOOOOOXX |
| | CmU*mU*mU | UU | |
| WV-38386 | fU*fA*mAfUmAfUmCfUmUfAmAmAmGfAmAfAmAf | UAAUAUCUUAAAGAAAACC | XXOOOOOOOOOOOOOOOOXX |
| | CmC*mU*mU | UU | |
| WV-38387 | fU*fU*mUfGmUfCmCfAmCfCmUmUmUfAmAfAmUf | UUUGUCCACCUUUAAAUGG | XXOOOOOOOOOOOOOOOOXX |
| | GmG*mU*mU | UU | |
| WV-38388 | fU*fU*mUfUmGfUmCfCmAfCmCmUmUfUmAfAmAf | UUUUGUCCACCUUUAAAU | XXOOOOOOOOOOOOOOOOXX |
| | UmG*mU*mU | GUU | |
| WV-38389 | fU*fU*mUfAmCfUmUfUmUfAmGmGmGfAmGfGmU | UUUACUUUUAGGGAGGUA | XXOOOOOOOOOOOOOOOOXX |
| | fAmG*mU*mU | GUU | |
| WV-38390 | fU*fU*mUfGmUfAmUfUmUfAmCmUmUfUmUfAmG | UUUGUAUUUACUUUUAGG | XXOOOOOOOOOOOOOOOOXX |
| | fGmG*mU*mU | GUU | |
| WV-38391 | fU*fC*mUfUmUfGmUfAmUfUmUmAmCfUmUfUmU | UCUUUGUAUUUACUUUUA | XXOOOOOOOOOOOOOOOOXX |
| | fAmG*mU*mU | GUU | |
| WV-38392 | fU*fA*mCfAmGfUmCfUmUfAmAmAmCfCmUfUmCf | UACAGUCUUAAACCUUCCC | XXOOOOOOOOOOOOOOOOXX |
| | CmC*mU*mU | UU | |
| WV-38393 | fU*fG*mAfAmCfAmGfUmCfUmUmAmAfAmCfCmUf | UGAACAGUCUUAAACCUUC | XXOOOOOOOOOOOOOOOOXX |
| | UmC*mU*mU | UU | |
| WV-38394 | fU*fU*mGfAmAfCmAfGmUfCmUmUmAfAmAfCmCf | UUGAACAGUCUUAAACCUU | XXOOOOOOOOOOOOOOOOXX |
| | UmU*mU*mU | UU | |
| WV-38395 | fU*fC*mUfUmGfAmAfCmAfGmUmCmUfUmAfAmAf | UCUUGAACAGUCUUAAACC | XXOOOOOOOOOOOOOOOOXX |
| | CmC*mU*mU | UU | |
| WV-38396 | fU*fA*mCfUmUfGmAfAmCfAmGmUmCfUmUfAmAf | UACUUGAACAGUCUUAAAC | XXOOOOOOOOOOOOOOOOXX |
| | AmC*mU*mU | UU | |
| WV-38397 | fU*fA*mUfGmCfUmAfCmUfUmGmAmAfCmAfGmUf | UAUGCUACUUGAACAGUCU | XXOOOOOOOOOOOOOOOOXX |
| | CmU*mU*mU | UU | |
| WV-38398 | fU*fU*mGfGmAfAmUfGmCfUmAmCmUfUmGfAmA | UUGGAAUGCUACUUGAACA | XXOOOOOOOOOOOOOOOOXX |
| | fCmA*mU*mU | UU | |
| WV-38399 | fU*fU*mUfGmGfAmAfUmGfCmUmAmCfUmUfGmA | UUUGGAAUGCUACUUGAA | XXOOOOOOOOOOOOOOOOXX |
| | fAmC*mU*mU | CUU | |
| WV-38400 | fU*fA*mCfAmGfAmUfUmGfGmAmAmUfGmCfUmAf | UACAGAUUGGAAUGCUACU | XXOOOOOOOOOOOOOOOOXX |
| | CmU*mU*mU | UU | |
| WV-38401 | fU*fC*mUfUmGfUmUfGmAfUmAmUmUfCmUfGmU | UCUUGUUGAUAUUCUGUG | XXOOOOOOOOOOOOOOOOXX |
| | fGmG*mU*mU | GUU | |
| WV-38402 | fU*fU*mCfUmUfGmUfUmGfAmUmAmUfUmCfUmG | UUCUUGUUGAUAUUCUGU | XXOOOOOOOOOOOOOOOOXX |
| | fUmG*mU*mU | GUU | |
| WV-38403 | fU*fG*mUfUmCfUmUfGmUfUmGmAmUfAmUfUmC | UGUUCUUGUUGAUAUUCU | XXOOOOOOOOOOOOOOOOXX |
| | fUmG*mU*mU | GUU | |
| WV-38404 | fU*fG*mUfGmUfUmCfUmUfGmUmUmGfAmUfAm | UGUGUUCUUGUUGAUAUU | XXOOOOOOOOOOOOOOOOXX |
| | UfUmC*mU*mU | CUU | |
| WV-38405 | fU*fC*mAfUmUfCmUfGmUfGmUmUmCfUmUfGmU | UCAUUCUGUGUUCUUGUU | XXOOOOOOOOOOOOOOOOXX |
| | fUmG*mU*mU | GUU | |
| WV-38406 | fU*fA*mGfCmUfGmUfGmCfAmCmUmCfAmUfUmCf | UAGCUGUGCACUCAUUCUG | XXOOOOOOOOOOOOOOOOXX |
| | UmG*mU*mU | UU | |
| WV-38407 | fU*fU*mAfGmCfUmGfUmGfCmAmCmUfCmAfUmUf | UUAGCUGUGCACUCAUUCU | XXOOOOOOOOOOOOOOOOXX |
| | CmU*mU*mU | UU | |
| WV-38408 | fU*fA*mGfGmGfAmAfAmUfCmUmUmUfCmAfAmAf | UAGGGAAAUCUUUCAAAU | XXOOOOOOOOOOOOOOOOXX |
| | UmG*mU*mU | GUU | |
| WV-38409 | fU*fA*mGfAmGfUmUfGmCfAmCmCmGfUmUfUmU | UAGAGUUGCACCGUUUUG | XXOOOOOOOOOOOOOOOOXX |
| | fGmG*mU*mU | GUU | |
| WV-38410 | fU*fC*mCfAmGfAmAfUmAfGmAmGmUfUmGfCmAf | UCCAGAAUAGAGUUGCACC | XXOOOOOOOOOOOOOOOOXX |
| | CmC*mU*mU | UU | |
| WV-38411 | fU*fA*mGfUmCfCmAfGmAfAmUmAmGfAmGfUmUf | UAGUCCAGAAUAGAGUUGC | XXOOOOOOOOOOOOOOOOXX |
| | GmC*mU*mU | UU | |
| WV-38412 | fU*fU*mUfGmAfGmCfCmUfAmAmAmAfUmUfGmU | UUUGAGCCUAAAAUUGUC | XXOOOOOOOOOOOOOOOOXX |
| | fCmU*mU*mU | UUU | |
| WV-38413 | fU*fU*mUfUmGfAmGfCmCfUmAmAmAfAmUfUmG | UUUUGAGCCUAAAAUUGU | XXOOOOOOOOOOOOOOOOXX |
| | fUmC*mU*mU | CUU | |
| WV-38414 | fU*fA*mGfCmUfUmUfAmAfUmUmUmUfUmGfAmG | UAGCUUUAAUUUUUGAGC | XXOOOOOOOOOOOOOOOOXX |
| | fCmC*mU*mU | CUU | |
| WV-38415 | fU*fU*mAfGmCfUmUfUmAfAmUmUmUfUmUfGmA | UUAGCUUUAAUUUUUGAG | XXOOOOOOOOOOOOOOOOXX |
| | fGmC*mU*mU | CUU | |
| WV-38416 | fU*fU*mCfCmUfUmUfUmCfCmUmGmUfGmUfUmA | UUCCUUUUCCUGUGUUAG | XXOOOOOOOOOOOOOOOOXX |
| | fGmC*mU*mU | CUU | |
| WV-38417 | fU*fA*mAfUmAfGmCfCmAfGmUmAmCfAmGfUmUf | UAAUAGCCAGUACAGUUCC | XXOOOOOOOOOOOOOOOOXX |
| | CmC*mU*mU | UU | |
| WV-38418 | fU*fU*mAfGmUfCmUfUmGfAmUmGmUfAmGfUmG | UUAGUCUUGAUGUAGUGG | XXOOOOOOOOOOOOOOOOXX |
| | fGmG*mU*mU | GUU | |
| WV-38419 | mAmCfAmCfAmAfGfGfAmCfUmGfAmAfCmCfAmGf | ACACAAGGACUGAACCAGA | OOOOOOOOOOOOOOOOOO |
| | A | | |
| WV-38420 | mCmAfCmAfAmGfGfAfCmUfGmAfAmCfCmAfGmAf | CACAAGGACUGAACCAGAA | OOOOOOOOOOOOOOOOOO |
| | A | | |
| WV-38421 | mGmGfAmCfUmGfAfAfCmCfAmGfAmAfGmGfAmAf | GGACUGAACCAGAAGGAAA | OOOOOOOOOOOOOOOOOO |
| | A | | |
| WV-38422 | mGmAfCmUfGmAfAfCfCmAfGmAfAmGfGmAfAmGf | GACUGAACCAGAAGGAAGA | OOOOOOOOOOOOOOOOOO |
| | A | | |
| WV-38423 | mCmCfAmGfAmAfGfGfAmAfGmAfGmGfAmCfAmGf | CCAGAAGGAAGAGGACAGA | OOOOOOOOOOOOOOOOOO |
| | A | | |
| WV-38424 | mGmAfAmGfGmAfAfGfAmGfGmAfCmAfGmAfGmCf | GAAGGAAGAGGACAGAGCA | OOOOOOOOOOOOOOOOOO |
| | A | | |
| WV-38425 | mAmGfGmAfAmGfAfGfGmAfCmAfGmAfGmCfAmAf | AGGAAGAGGACAGAGCAAA | OOOOOOOOOOOOOOOOOO |
| | A | | |
| WV-38426 | mGmGfAmAfGmAfGfGfAmCfAmGfAmGfCmAfAmAf | GGAAGAGGACAGAGCAAAA | OOOOOOOOOOOOOOOOOO |
| | A | | |
| WV-38427 | mAmGfAmGfGmAfCfAfGmAfGmCfAmAfAmGfCmCf | AGAGGACAGAGCAAAGCCA | OOOOOOOOOOOOOOOOOO |
| | A | | |
| WV-38428 | mGmAfGmGfAmCfAfGfAmGfCmAfAmAfGmCfCmAf | GAGGACAGAGCAAAGCCAA | OOOOOOOOOOOOOOOOOO |
| | A | | |
| WV-38429 | mGmGfAmCfAmGfAfGfCmAfAmAfGmCfCmAfUmGf | GGACAGAGCAAAGCCAUGA | OOOOOOOOOOOOOOOOOO |
| | A | | |
| WV-38430 | mGmAfCmAfGmAfGfCfAmAfAmGfCmCfAmUfGmAf | GACAGAGCAAAGCCAUGAA | OOOOOOOOOOOOOOOOOO |
| | A | | |
| WV-38431 | mAmGfAmGfCmAfAfAfGmCfCmAfUmGfAmAfCmAf | AGAGCAAAGCCAUGAACAA | OOOOOOOOOOOOOOOOOO |
| | A | | |
| WV-38432 | mAmGfCmAfAmAfGfCfCmAfUmGfAmAfCmAfUmCf | AGCAAAGCCAUGAACAUCA | OOOOOOOOOOOOOOOOOO |
| | A | | |
| WV-38433 | mGmCfAmAfAmGfCfCfAmUfGmAfAmCfAmUfCmAf | GCAAAGCCAUGAACAUCAA | OOOOOOOOOOOOOOOOOO |
| | A | | |
| WV-38434 | mAmGfCmCfAmUfGfAfAmCfAmUfCmAfUmCfCmUf | AGCCAUGAACAUCAUCCUA | OOOOOOOOOOOOOOOOOO |
| | A | | |
| WV-38435 | mCmCfAmUfGmAfAfCfAmUfCmAfUmCfCmUfAmGf | CCAUGAACAUCAUCCUAGA | OOOOOOOOOOOOOOOOOO |
| | A | | |
| WV-38436 | mCmAfUmGfAmAfCfAfUmCfAmUfCmCfUmAfGmAf | CAUGAACAUCAUCCUAGAA | OOOOOOOOOOOOOOOOOO |
| | A | | |
| WV-38437 | mAmUfGmAfAmCfAfUfCmAfUmCfCmUfAmGfAmAf | AUGAACAUCAUCCUAGAAA | OOOOOOOOOOOOOOOOOO |
| | A | | |
| WV-38438 | mUmGfAmAfCmAfUfCfAmUfCmCfUmAfGmAfAmAf | UGAACAUCAUCCUAGAAAA | OOOOOOOOOOOOOOOOOO |
| | A | | |
| WV-38439 | mGmAfAmCfAmUfCfAfUmCfCmUfAmGfAmAfAmUf | GAACAUCAUCCUAGAAAUA | OOOOOOOOOOOOOOOOOO |
| | A | | |
| WV-38440 | mCmAfUmCfAmUfCfCfUmAfGmAfAmAfUmCfCmUf | CAUCAUCCUAGAAAUCCUA | OOOOOOOOOOOOOOOOOO |
| | A | | |
| WV-38441 | mCmCfUmAfGmAfAfAfUmCfCmUfUmCfUmGfCmUf | CCUAGAAAUCCUUCUGCUA | OOOOOOOOOOOOOOOOOO |
| | A | | |
| WV-38442 | mUmAfGmAfAmAfUfCfCmUfUmCfUmGfCmUfUmCf | UAGAAAUCCUUCUGCUUCA | OOOOOOOOOOOOOOOOOO |
| | A | | |
| WV-38443 | mGmAfAmAfUmCfCfUfUmCfUmGfCmUfUmCfUmGf | GAAAUCCUUCUGCUUCUGA | OOOOOOOOOOOOOOOOOO |
| | A | | |
| WV-38444 | mAmAfAmUfCmCfUfUfCmUfGmCfUmUfCmUfGmAf | AAAUCCUUCUGCUUCUGAA | OOOOOOOOOOOOOOOOOO |
| | A | | |
| WV-38445 | mAmUfCmCfUmUfCfUfGmCfUmUfCmUfGmAfUmCf | AUCCUUCUGCUUCUGAUCA | OOOOOOOOOOOOOOOOOO |
| | A | | |
| WV-38446 | mCmUfUmCfUmGfCfUfUmCfUmGfAmUfCmAfCmCf | CUUCUGCUUCUGAUCACCA | OOOOOOOOOOOOOOOOOO |
| | A | | |
| WV-38447 | mCmUfGmCfUmUfCfUfGmAfUmCfAmCfCmAfUmCf | CUGCUUCUGAUCACCAUCA | OOOOOOOOOOOOOOOOOO |
| | A | | |
| WV-38448 | mUmGfCmUfUmCfUfGfAmUfCmAfCmCfAmUfCmAf | UGCUUCUGAUCACCAUCAA | OOOOOOOOOOOOOOOOOO |
| | A | | |
| WV-38449 | mGmCfUmUfCmUfGfAfUmCfAmCfCmAfUmCfAmUf | GCUUCUGAUCACCAUCAUA | OOOOOOOOOOOOOOOOOO |
| | A | | |
| WV-38450 | mUmUfCmUfGmAfUfCfAmCfCmAfUmCfAmUfCmUf | UUCUGAUCACCAUCAUCUA | OOOOOOOOOOOOOOOOOO |
| | A | | |
| WV-38451 | mUmCfAmCfCmAfUfCfAmUfCmUfAmCfUmCfCmUf | UCACCAUCAUCUACUCCUA | OOOOOOOOOOOOOOOOOO |
| | A | | |
| WV-38452 | mCmCfAmUfCmAfUfCfUmAfCmUfCmCfUmAfCmUf | CCAUCAUCUACUCCUACUA | OOOOOOOOOOOOOOOOOO |
| | A | | |
| WV-38453 | mCmAfUmCfAmUfCfUfAmCfUmCfCmUfAmCfUmUf | CAUCAUCUACUCCUACUUA | OOOOOOOOOOOOOOOOOO |
| | A | | |
| WV-38454 | mUmCfAmUfCmUfAfCfUmCfCmUfAmCfUmUfGmGf | UCAUCUACUCCUACUUGGA | OOOOOOOOOOOOOOOOOO |
| | A | | |
| WV-38455 | mAmCfUmCfCmUfAfCfUmUfGmGfAmGfUmCfGmUf | ACUCCUACUUGGAGUCGUA | OOOOOOOOOOOOOOOOOO |
| | A | | |
| WV-38456 | mCmCfUmAfCmUfUfGfGmAfGmUfCmGfUmUfGmGf | CCUACUUGGAGUCGUUGG | OOOOOOOOOOOOOOOOOO |
| | A | A | |
| WV-38457 | mAmAfGmUfUmUfUfUfCmAfUmUfCmCfUmCfAmGf | AAGUUUUUCAUUCCUCAGA | OOOOOOOOOOOOOOOOOO |
| | A | | |
| WV-38458 | mCmAfUmUfCmCfUfCfAmGfAmGfGmAfGmAfAmAf | CAUUCCUCAGAGGAGAAAA | OOOOOOOOOOOOOOOOOO |
| | A | | |
| WV-38459 | mCmUfCmAfGmAfGfGfAmGfAmAfAmAfUmCfUmGf | CUCAGAGGAGAAAAUCUGA | OOOOOOOOOOOOOOOOOO |
| | A | | |
| WV-38460 | mGmGfGmAfGmAfUfUfGmUfUmCfUmCfAmUfUmA | GGGAGAUUGUUCUCAUUA | OOOOOOOOOOOOOOOOOO |
| | fA | A | |
| WV-38461 | mGmGfAmGfAmUfUfGfUmUfCmUfCmAfUmUfAmCf | GGAGAUUGUUCUCAUUAC | OOOOOOOOOOOOOOOOOO |
| | A | A | |
| WV-38462 | mGmAfGmAfUmUfGfUfUmCfUmCfAmUfUmAfCmUf | GAGAUUGUUCUCAUUACU | OOOOOOOOOOOOOOOOOO |
| | A | A | |
| WV-38463 | mGmAfUmUfGmUfUfCfUmCfAmUfUmAfCmUfGmG | GAUUGUUCUCAUUACUGG | OOOOOOOOOOOOOOOOOO |
| | fA | A | |
| WV-38464 | mGmGfAmAfUmAfGfGfCmAfGmGfCmAfGmAfCmUf | GGAAUAGGCAGGCAGACUA | OOOOOOOOOOOOOOOOOO |
| | A | | |
| WV-38465 | mGmAfAmUfAmGfGfCfAmGfGmCfAmGfAmCfUmAf | GAAUAGGCAGGCAGACUAA | OOOOOOOOOOOOOOOOOO |
| | A | | |
| WV-38466 | mGmGfUmUfCmUfGfUfGmGfGmAfUmAfUmUfAmA | GGUUCUGUGGGAUAUUAA | OOOOOOOOOOOOOOOOOO |
| | fA | A | |
| WV-38467 | mUmGfAmAfGmAfAfAfGmAfAmGfUmGfGmGfUmG | UGAAGAAAGAAGUGGGUG | OOOOOOOOOOOOOOOOOO |
| | fA | A | |
| WV-38468 | mGmAfAmGfAmAfAfGfAmAfGmUfGmGfGmUfGmAf | GAAGAAAGAAGUGGGUGA | OOOOOOOOOOOOOOOOOO |
| | A | A | |
| WV-38469 | mGmAfAmAfGmAfAfGfUmGfGmGfUmGfAmUfGmU | GAAAGAAGUGGGUGAUGU | OOOOOOOOOOOOOOOOOO |
| | fA | A | |
| WV-38470 | mAmAfAmGfAmAfGfUfGmGfGmUfGmAfUmGfUmA | AAAGAAGUGGGUGAUGUA | OOOOOOOOOOOOOOOOOO |
| | fA | A | |
| WV-38471 | mAmGfAmAfGmUfGfGfGmUfGmAfUmGfUmAfAmC | AGAAGUGGGUGAUGUAAC | OOOOOOOOOOOOOOOOOO |
| | fA | A | |
| WV-38472 | mGmAfAmGfUmGfGfGfUmGfAmUfGmUfAmAfCmA | GAAGUGGGUGAUGUAACA | OOOOOOOOOOOOOOOOOO |
| | fA | A | |
| WV-38473 | mAmAfGmUfGmGfGfUfGmAfUmGfUmAfAmCfAmAf | AAGUGGGUGAUGUAACAA | OOOOOOOOOOOOOOOOOO |
| | A | A | |
| WV-38474 | mGmAfUmGfUmAfAfCfAmAfUmCfGmUfGmGfUmGf | GAUGUAACAAUCGUGGUG | OOOOOOOOOOOOOOOOOO |
| | A | A | |
| WV-38475 | mGmUfAmAfCmAfAfUfCmGfUmGfGmUfGmAfAmUf | GUAACAAUCGUGGUGAAU | OOOOOOOOOOOOOOOOOO |
| | A | A | |
| WV-38476 | mUmAfAmCfAmAfUfCfGmUfGmGfUmGfAmAfUmAf | UAACAAUCGUGGUGAAUAA | OOOOOOOOOOOOOOOOOO |
| | A | | |
| WV-38477 | mGmGfUmGfAmAfUfAfAmUfGmCfUmGfGmGfAmCf | GGUGAAUAAUGCUGGGAC | OOOOOOOOOOOOOOOOOO |
| | A | A | |
| WV-38478 | mGmAfAmUfAmAfUfGfCmUfGmGfGmAfCmAfGmUf | GAAUAAUGCUGGGACAGUA | OOOOOOOOOOOOOOOOOO |
| | A | | |
| WV-38479 | mAmAfUmAfAmUfGfCfUmGfGmGfAmCfAmGfUmAf | AAUAAUGCUGGGACAGUAA | OOOOOOOOOOOOOOOOOO |
| | A | | |
| WV-38480 | mAmUfAmAfUmGfCfUfGmGfGmAfCmAfGmUfAmUf | AUAAUGCUGGGACAGUAU | OOOOOOOOOOOOOOOOOO |
| | A | A | |
| WV-38481 | mGmGfAmCfAmGfUfAfUmAfUmCfCmAfGmCfCmGf | GGACAGUAUAUCCAGCCGA | OOOOOOOOOOOOOOOOOO |
| | A | | |
| WV-38482 | mGmAfCmAfGmUfAfUfAmUfCmCfAmGfCmCfGmAf | GACAGUAUAUCCAGCCGAA | OOOOOOOOOOOOOOOOOO |
| | A | | |
| WV-38483 | mCmAfGmUfAmUfAfUfCmCfAmGfCmCfGmAfUmCf | CAGUAUAUCCAGCCGAUCA | OOOOOOOOOOOOOOOOOO |
| | A | | |
| WV-38484 | mAmGfUmAfUmAfUfCfCmAfGmCfCmGfAmUfCmUf | AGUAUAUCCAGCCGAUCUA | OOOOOOOOOOOOOOOOOO |
| | A | | |
| WV-38485 | mGmCfAmCfCmAfAfGfGmAfUmGfAmAfGmAfGmAf | GCACCAAGGAUGAAGAGAA | OOOOOOOOOOOOOOOOOO |
| | A | | |
| WV-38486 | mCmAfCmCfAmAfGfGfAmUfGmAfAmGfAmGfAmUf | CACCAAGGAUGAAGAGAUA | OOOOOOOOOOOOOOOOOO |
| | A | | |
| WV-38487 | mAmCfCmAfAmGfGfAfUmGfAmAfGmAfGmAfUmUf | ACCAAGGAUGAAGAGAUUA | OOOOOOOOOOOOOOOOOO |
| | A | | |
| WV-38488 | mAmAfGmGfAmUfGfAfAmGfAmGfAmUfUmAfCmCf | AAGGAUGAAGAGAUUACCA | OOOOOOOOOOOOOOOOOO |
| | A | | |
| WV-38489 | mAmGfGmAfUmGfAfAfGmAfGmAfUmUfAmCfCmAf | AGGAUGAAGAGAUUACCAA | OOOOOOOOOOOOOOOOOO |
| | A | | |
| WV-38490 | mCmAfUmUfUmGfAfGfGmUfCmAfAmCfAmUfCmCf | CAUUUGAGGUCAACAUCCA | OOOOOOOOOOOOOOOOOO |
| | A | | |
| WV-38491 | mAmUfUmUfGmAfGfGfUmCfAmAfCmAfUmCfCmUf | AUUUGAGGUCAACAUCCUA | OOOOOOOOOOOOOOOOOO |
| | A | | |
| WV-38492 | mCmUfAmGfGmAfCfAfUmUfUmUfUmGfGmAfUmCf | CUAGGACAUUUUUGGAUC | OOOOOOOOOOOOOOOOOO |
| | A | A | |
| WV-38493 | mAmGfGmAfCmAfUfUfUmUfUmGfGmAfUmCfAmCf | AGGACAUUUUUGGAUCACA | OOOOOOOOOOOOOOOOOO |
| | A | | |
| WV-38494 | mGmGfAmCfAmUfUfUfUmUfGmGfAmUfCmAfCmAf | GGACAUUUUUGGAUCACAA | OOOOOOOOOOOOOOOOOO |
| | A | | |
| WV-38495 | mGmAfCmAfUmUfUfUfUmGfGmAfUmCfAmCfAmAf | GACAUUUUUGGAUCACAAA | OOOOOOOOOOOOOOOOOO |
| | A | | |
| WV-38496 | mAmCfAmUfUmUfUfUfGmGfAmUfCmAfCmAfAmAf | ACAUUUUUGGAUCACAAAA | OOOOOOOOOOOOOOOOOO |
| | A | | |
| WV-38497 | mGmGfAmUfCmAfCfAfAmAfAmGfCmAfCmUfUmCf | GGAUCACAAAAGCACUUCA | OOOOOOOOOOOOOOOOOO |
| | A | | |
| WV-38498 | mGmAfUmCfAmCfAfAfAmAfGmCfAmCfUmUfCmUf | GAUCACAAAAGCACUUCUA | OOOOOOOOOOOOOOOOOO |
| | A | | |
| WV-38499 | mCmAfCmAfAmAfAfGfCmAfCmUfUmCfUmUfCmCf | CACAAAAGCACUUCUUCCA | OOOOOOOOOOOOOOOOOO |
| | A | | |
| WV-38500 | mAmCfAmAfAmAfGfCfAmCfUmUfCmUfUmCfCmAf | ACAAAAGCACUUCUUCCAA | OOOOOOOOOOOOOOOOOO |
| | A | | |
| WV-38501 | mAmAfAmGfCmAfCfUfUmCfUmUfCmCfAmUfCmGf | AAAGCACUUCUUCCAUCGA | OOOOOOOOOOOOOOOOOO |
| | A | | |
| WV-38502 | mGmAfGmAfGmAfAfAfUmCfAmUfGmGfCmCfAmCf | GAGAGAAAUCAUGGCCACA | OOOOOOOOOOOOOOOOOO |
| | A | | |
| WV-38503 | mUmCfCmCfAmUfAfUfUmGfUmUfCmCfAmGfCmAf | UCCCAUAUUGUUCCAGCAA | OOOOOOOOOOOOOOOOOO |
| | A | | |
| WV-38504 | mCmCfCmAfUmAfUfUfGmUfUmCfCmAfGmCfAmAf | CCCAUAUUGUUCCAGCAAA | OOOOOOOOOOOOOOOOOO |
| | A | | |
| WV-38505 | mCmCfAmUfAmUfUfGfUmUfCmCfAmGfCmAfAmAf | CCAUAUUGUUCCAGCAAAA | OOOOOOOOOOOOOOOOOO |
| | A | | |
| WV-38506 | mCmAfUmAfUmUfGfUfUmCfCmAfGmCfAmAfAmUf | CAUAUUGUUCCAGCAAAUA | OOOOOOOOOOOOOOOOOO |
| | A | | |
| WV-38507 | mAmUfAmUfUmGfUfUfCmCfAmGfCmAfAmAfUmUf | AUAUUGUUCCAGCAAAUUA | OOOOOOOOOOOOOOOOOO |
| | A | | |
| WV-38508 | mGmCfCmGfCmUfGfUfUmGfGmCfUmUfUmCfAmCf | GCCGCUGUUGGCUUUCACA | OOOOOOOOOOOOOOOOOO |
| | A | | |
| WV-38509 | mCmGfCmUfGmUfUfGfGmCfUmUfUmCfAmCfAmGf | CGCUGUUGGCUUUCACAGA | OOOOOOOOOOOOOOOOOO |
| | A | | |
| WV-38510 | mGmGfCmUfUmUfCfAfCmAfGmAfGmGfUmCfUmGf | GGCUUUCACAGAGGUCUGA | OOOOOOOOOOOOOOOOOO |
| | A | | |
| WV-38511 | mCmUfUmUfCmAfCfAfGmAfGmGfUmCfUmGfAmCf | CUUUCACAGAGGUCUGACA | OOOOOOOOOOOOOOOOOO |
| | A | | |
| WV-38512 | mAmCfAmGfAmGfGfUfCmUfGmAfCmAfUmCfAmGf | ACAGAGGUCUGACAUCAGA | OOOOOOOOOOOOOOOOOO |
| | A | | |
| WV-38513 | mCmAfGmAfGmGfUfCfUmGfAmCfAmUfCmAfGmAf | CAGAGGUCUGACAUCAGAA | OOOOOOOOOOOOOOOOOO |
| | A | | |
| WV-38514 | mGmUfCmUfGmAfCfAfUmCfAmGfAmAfCmUfUmCf | GUCUGACAUCAGAACUUCA | OOOOOOOOOOOOOOOOOO |
| | A | | |
| WV-38515 | mGmCfCmUfUmGfGfGfAmAfAmAfAmCfUmGfGmUf | GCCUUGGGAAAAACUGGUA | OOOOOOOOOOOOOOOOOO |
| | A | | |
| WV-38516 | mGmGfGmAfAmAfAfAfCmUfGmGfUmAfUmCfAmAf | GGGAAAAACUGGUAUCAAA | OOOOOOOOOOOOOOOOOO |
| | A | | |
| WV-38517 | mGmGfAmAfAmAfAfCfUmGfGmUfAmUfCmAfAmAf | GGAAAAACUGGUAUCAAAA | OOOOOOOOOOOOOOOOOO |
| | A | | |
| WV-38518 | mAmAfCmUfGmGfUfAfUmCfAmAfAmAfCmCfUmCf | AACUGGUAUCAAAACCUCA | OOOOOOOOOOOOOOOOOO |
| | A | | |
| WV-38519 | mGmUfAmUfCmAfAfAfAmCfCmUfCmAfUmGfUmCf | GUAUCAAAACCUCAUGUCA | OOOOOOOOOOOOOOOOOO |
| | A | | |
| WV-38520 | mUmGfAmAfUmAfCfUfGmGfGmUfUmCfAmCfCmAf | UGAAUACUGGGUUCACCAA | OOOOOOOOOOOOOOOOOO |
| | A | | |
| WV-38521 | mGmAfAmUfAmCfUfGfGmGfUmUfCmAfCmCfAmAf | GAAUACUGGGUUCACCAAA | OOOOOOOOOOOOOOOOOO |
| | A | | |
| WV-38522 | mAmAfUmAfCmUfGfGfGmUfUmCfAmCfCmAfAmAf | AAUACUGGGUUCACCAAAA | OOOOOOOOOOOOOOOOOO |
| | A | | |
| WV-38523 | mAmUfAmCfUmGfGfGfUmUfCmAfCmCfAmAfAmAf | AUACUGGGUUCACCAAAAA | OOOOOOOOOOOOOOOOOO |
| | A | | |
| WV-38524 | mGmGfGmUfUmCfAfCfCmAfAmAfAmAfUmCfCmAf | GGGUUCACCAAAAAUCCAA | OOOOOOOOOOOOOOOOOO |
| | A | | |
| WV-38525 | mCmAfAmAfAmAfUfCfCmAfAmGfCmAfCmAfAmGf | CAAAAAUCCAAGCACAAGA | OOOOOOOOOOOOOOOOOO |
| | A | | |
| WV-38526 | mAmAfAmUfCmCfAfAfGmCfAmCfAmAfGmAfUmUf | AAAUCCAAGCACAAGAUUA | OOOOOOOOOOOOOOOOOO |
| | A | | |
| WV-38527 | mAmAfUmCfCmAfAfGfCmAfCmAfAmGfAmUfUmAf | AAUCCAAGCACAAGAUUAA | OOOOOOOOOOOOOOOOOO |
| | A | | |
| WV-38528 | mCmAfCmAfAmGfAfUfUmAfUmGfGmCfCmUfGmUf | CACAAGAUUAUGGCCUGUA | OOOOOOOOOOOOOOOOOO |
| | A | | |
| WV-38529 | mAmCfAmAfGmAfUfUfAmUfGmGfCmCfUmGfUmAf | ACAAGAUUAUGGCCUGUAA | OOOOOOOOOOOOOOOOOO |
| | A | | |
| WV-38530 | mCmAfAmGfAmUfUfAfUmGfGmCfCmUfGmUfAmUf | CAAGAUUAUGGCCUGUAUA | OOOOOOOOOOOOOOOOOO |
| | A | | |
| WV-38531 | mGmAfUmUfAmUfGfGfCmCfUmGfUmAfUmUfGmG | GAUUAUGGCCUGUAUUGG | OOOOOOOOOOOOOOOOOO |
| | fA | A | |
| WV-38532 | mGmGfCmCfUmGfUfAfUmUfGmGfAmGfAmCfAmGf | GGCCUGUAUUGGAGACAG | OOOOOOOOOOOOOOOOOO |
| | A | A | |
| WV-38533 | mCmUfGmUfAmUfUfGfGmAfGmAfCmAfGmAfUmGf | CUGUAUUGGAGACAGAUG | OOOOOOOOOOOOOOOOOO |
| | A | A | |
| WV-38534 | mUmGfUmAfUmUfGfGfAmGfAmCfAmGfAmUfGmA | UGUAUUGGAGACAGAUGA | OOOOOOOOOOOOOOOOOO |
| | fA | A | |
| WV-38535 | mGmGfAmGfAmCfAfGfAmUfGmAfAmGfUmCfGmUf | GGAGACAGAUGAAGUCGUA | OOOOOOOOOOOOOOOOOO |
| | A | | |
| WV-38536 | mGmAfGmAfCmAfGfAfUmGfAmAfGmUfCmGfUmAf | GAGACAGAUGAAGUCGUAA | OOOOOOOOOOOOOOOOOO |
| | A | | |
| WV-38537 | mGmAfCmAfGmAfUfGfAmAfGmUfCmGfUmAfAmGf | GACAGAUGAAGUCGUAAGA | OOOOOOOOOOOOOOOOOO |
| | A | | |
| WV-38538 | mAmCfAmGfAmUfGfAfAmGfUmCfGmUfAmAfGmAf | ACAGAUGAAGUCGUAAGAA | OOOOOOOOOOOOOOOOOO |
| | A | | |
| WV-38539 | mAmGfAmUfGmAfAfGfUmCfGmUfAmAfGmAfAmGf | AGAUGAAGUCGUAAGAAGA | OOOOOOOOOOOOOOOOOO |
| | A | | |
| WV-38540 | mGmAfAmGfUmCfGfUfAmAfGmAfAmGfUmCfUmGf | GAAGUCGUAAGAAGUCUGA | OOOOOOOOOOOOOOOOOO |
| | A | | |
| WV-38541 | mAmGfUmCfGmUfAfAfGmAfAmGfUmCfUmGfAmUf | AGUCGUAAGAAGUCUGAU | OOOOOOOOOOOOOOOOOO |
| | A | A | |
| WV-38542 | mCmGfUmAfAmGfAfAfGmUfCmUfGmAfUmAfGmAf | CGUAAGAAGUCUGAUAGAA | OOOOOOOOOOOOOOOOOO |
| | A | | |
| WV-38543 | mAmAfGmAfAmGfUfCfUmGfAmUfAmGfAmUfGmGf | AAGAAGUCUGAUAGAUGG | OOOOOOOOOOOOOOOOOO |
| | A | A | |
| WV-38544 | mAmGfAmAfGmUfCfUfGmAfUmAfGmAfUmGfGmAf | AGAAGUCUGAUAGAUGGA | OOOOOOOOOOOOOOOOOO |
| | A | A | |
| WV-38545 | mGmAfAmGfUmCfUfGfAmUfAmGfAmUfGmGfAmAf | GAAGUCUGAUAGAUGGAA | OOOOOOOOOOOOOOOOOO |
| | A | A | |
| WV-38546 | mAmAfGmUfCmUfGfAfUmAfGmAfUmGfGmAfAmUf | AAGUCUGAUAGAUGGAAU | OOOOOOOOOOOOOOOOOO |
| | A | A | |
| WV-38547 | mUmCfUmGfAmUfAfGfAmUfGmGfAmAfUmAfCmUf | UCUGAUAGAUGGAAUACU | OOOOOOOOOOOOOOOOOO |
| | A | A | |
| WV-38548 | mCmUfGmAfUmAfGfAfUmGfGmAfAmUfAmCfUmUf | CUGAUAGAUGGAAUACUU | OOOOOOOOOOOOOOOOOO |
| | A | A | |
| WV-38549 | mUmAfGmAfUmGfGfAfAmUfAmCfUmUfAmCfCmAf | UAGAUGGAAUACUUACCAA | OOOOOOOOOOOOOOOOOO |
| | A | | |
| WV-38550 | mAmGfAmUfGmGfAfAfUmAfCmUfUmAfCmCfAmAf | AGAUGGAAUACUUACCAAA | OOOOOOOOOOOOOOOOOO |
| | A | | |
| WV-38551 | mGmAfUmGfGmAfAfUfAmCfUmUfAmCfCmAfAmUf | GAUGGAAUACUUACCAAUA | OOOOOOOOOOOOOOOOOO |
| | A | | |
| WV-38552 | mAmUfGmGfAmAfUfAfCmUfUmAfCmCfAmAfUmAf | AUGGAAUACUUACCAAUAA | OOOOOOOOOOOOOOOOOO |
| | A | | |
| WV-38553 | mGmGfAmAfUmAfCfUfUmAfCmCfAmAfUmAfAmGf | GGAAUACUUACCAAUAAGA | OOOOOOOOOOOOOOOOOO |
| | A | | |
| WV-38554 | mGmAfAmUfAmCfUfUfAmCfCmAfAmUfAmAfGmAf | GAAUACUUACCAAUAAGAA | OOOOOOOOOOOOOOOOOO |
| | A | | |
| WV-38555 | mAmAfUmAfCmUfUfAfCmCfAmAfUmAfAmGfAmAf | AAUACUUACCAAUAAGAAA | OOOOOOOOOOOOOOOOOO |
| | A | | |
| WV-38556 | mCmCfAmAfUmAfAfGfAmAfAmAfUmGfAmUfUmUf | CCAAUAAGAAAAUGAUUUA | OOOOOOOOOOOOOOOOOO |
| | A | | |
| WV-38557 | mCmAfAmUfAmAfGfAfAmAfAmUfGmAfUmUfUmUf | CAAUAAGAAAAUGAUUUUA | OOOOOOOOOOOOOOOOOO |
| | A | | |
| WV-38558 | mGmAfAmAfAmUfGfAfUmUfUmUfUmGfUmUfCmC | GAAAAUGAUUUUUGUUCC | OOOOOOOOOOOOOOOOOO |
| | fA | A | |
| WV-38559 | mAmAfAmUfCmAfAfAfAmUfGmAfAmAfUmGfAmAf | AAAUCAAAAUGAAAUGAAA | OOOOOOOOOOOOOOOOOO |
| | A | | |
| WV-38560 | mUmGfUmAfUmGfCfAfUmGfAmUfAmAfUmGfAmU | UGUAUGCAUGAUAAUGAU | OOOOOOOOOOOOOOOOOO |
| | fA | A | |
| WV-38561 | mGmAfAmUfCmAfAfUfGmCfUmGfCmAfAmAfGmCf | GAAUCAAUGCUGCAAAGCA | OOOOOOOOOOOOOOOOOO |
| | A | | |
| WV-38562 | mAmAfUmCfAmAfUfGfCmUfGmCfAmAfAmGfCmUf | AAUCAAUGCUGCAAAGCUA | OOOOOOOOOOOOOOOOOO |
| | A | | |
| WV-38563 | mCmAfAmGfAmUfUfAfAmUfUmAfCmCfUmGfUmCf | CAAGAUUAAUUACCUGUCA | OOOOOOOOOOOOOOOOOO |
| | A | | |
| WV-38564 | mCmUfGmUfCmUfUfCfCmUfGmUfUmUfCmUfCmAf | CUGUCUUCCUGUUUCUCAA | OOOOOOOOOOOOOOOOOO |
| | A | | |
| WV-38565 | mUmCfUmUfCmCfUfGfUmUfUmCfUmCfAmAfGmAf | UCUUCCUGUUUCUCAAGAA | OOOOOOOOOOOOOOOOOO |
| | A | | |
| WV-38566 | mCmUfUmCfCmUfGfUfUmUfCmUfCmAfAmGfAmAf | CUUCCUGUUUCUCAAGAAA | OOOOOOOOOOOOOOOOOO |
| | A | | |
| WV-38567 | mUmCfCmUfGmUfUfUfCmUfCmAfAmGfAmAfUmAf | UCCUGUUUCUCAAGAAUAA | OOOOOOOOOOOOOOOOOO |
| | A | | |
| WV-38568 | mCmCfUmGfUmUfUfCfUmCfAmAfGmAfAmUfAmUf | CCUGUUUCUCAAGAAUAUA | OOOOOOOOOOOOOOOOOO |
| | A | | |
| WV-38569 | mAmGfGmUfCmUfGfUfUmUfUmUfCmCfUmUfUmC | AGGUCUGUUUUUCCUUUC | OOOOOOOOOOOOOOOOOO |
| | fA | A | |
| WV-38570 | mGmGfUmCfUmGfUfUfUmUfUmCfCmUfUmUfCmA | GGUCUGUUUUUCCUUUCA | OOOOOOOOOOOOOOOOOO |
| | fA | A | |
| WV-38571 | mCmUfGmUfGmCfUfUfAmCfAmUfAmAfAmCfAmUf | CUGUGCUUACAUAAACAUA | OOOOOOOOOOOOOOOOOO |
| | A | | |
| WV-38572 | mGmCfUmUfAmCfAfUfAmAfAmCfAmUfAmCfUmUf | GCUUACAUAAACAUACUUA | OOOOOOOOOOOOOOOOOO |
| | A | | |
| WV-38573 | mCmUfUmAfCmAfUfAfAmAfCmAfUmAfCmUfUmAf | CUUACAUAAACAUACUUAA | OOOOOOOOOOOOOOOOOO |
| | A | | |
| WV-38574 | mAmCfUmUfAmAfAfAfGmGfUmUfUmUfCmUfUmU | ACUUAAAAGGUUUUCUUU | OOOOOOOOOOOOOOOOOO |
| | fA | A | |
| WV-38575 | mCmUfUmAfAmAfAfGfGmUfUmUfUmCfUmUfUmA | CUUAAAAGGUUUUCUUUA | OOOOOOOOOOOOOOOOOO |
| | fA | A | |
| WV-38576 | mAmAfAmGfGmUfUfUfUmCfUmUfUmAfAmGfAmU | AAAGGUUUUCUUUAAGAU | OOOOOOOOOOOOOOOOOO |
| | fA | A | |
| WV-38577 | mAmGfGmUfUmUfUfCfUmUfUmAfAmGfAmUfAmU | AGGUUUUCUUUAAGAUAU | OOOOOOOOOOOOOOOOOO |
| | fA | A | |
| WV-38578 | mGmGfUmUfUmUfCfUfUmUfAmAfGmAfUmAfUmU | GGUUUUCUUUAAGAUAUU | OOOOOOOOOOOOOOOOOO |
| | fA | A | |
| WV-38579 | mCmCfAmUfUmUfAfAfAmGfGmUfGmGfAmCfAmAf | CCAUUUAAAGGUGGACAAA | OOOOOOOOOOOOOOOOOO |
| | A | | |
| WV-38580 | mCmAfUmUfUmAfAfAfGmGfUmGfGmAfCmAfAmAf | CAUUUAAAGGUGGACAAAA | OOOOOOOOOOOOOOOOOO |
| | A | | |
| WV-38581 | mCmUfAmCfCmUfCfCfCmUfAmAfAmAfGmUfAmAf | CUACCUCCCUAAAAGUAAA | OOOOOOOOOOOOOOOOOO |
| | A | | |
| WV-38582 | mCmCfCmUfAmAfAfAfGmUfAmAfAmUfAmCfAmAf | CCCUAAAAGUAAAUACAAA | OOOOOOOOOOOOOOOOOO |
| | A | | |
| WV-38583 | mCmUfAmAfAmAfGfUfAmAfAmUfAmCfAmAfAmGf | CUAAAAGUAAAUACAAAGA | OOOOOOOOOOOOOOOOOO |
| | A | | |
| WV-38584 | mGmGfGmAfAmGfGfUfUmUfAmAfGmAfCmUfGmU | GGGAAGGUUUAAGACUGU | OOOOOOOOOOOOOOOOOO |
| | fA | A | |
| WV-38585 | mGmAfAmGfGmUfUfUfAmAfGmAfCmUfGmUfUmCf | GAAGGUUUAAGACUGUUC | OOOOOOOOOOOOOOOOOO |
| | A | A | |
| WV-38586 | mAmAfGmGfUmUfUfAfAmGfAmCfUmGfUmUfCmAf | AAGGUUUAAGACUGUUCA | OOOOOOOOOOOOOOOOOO |
| | A | A | |
| WV-38587 | mGmGfUmUfUmAfAfGfAmCfUmGfUmUfCmAfAmGf | GGUUUAAGACUGUUCAAG | OOOOOOOOOOOOOOOOOO |
| | A | A | |
| WV-38588 | mGmUfUmUfAmAfGfAfCmUfGmUfUmCfAmAfGmUf | GUUUAAGACUGUUCAAGU | OOOOOOOOOOOOOOOOOO |
| | A | A | |
| WV-38589 | mAmGfAmCfUmGfUfUfCmAfAmGfUmAfGmCfAmUf | AGACUGUUCAAGUAGCAUA | OOOOOOOOOOOOOOOOOO |
| | A | | |
| WV-38590 | mUmGfUmUfCmAfAfGfUmAfGmCfAmUfUmCfCmAf | UGUUCAAGUAGCAUUCCAA | OOOOOOOOOOOOOOOOOO |
| | A | | |
| WV-38591 | mGmUfUmCfAmAfGfUfAmGfCmAfUmUfCmCfAmAf | GUUCAAGUAGCAUUCCAAA | OOOOOOOOOOOOOOOOOO |
| | A | | |
| WV-38592 | mAmGfUmAfGmCfAfUfUmCfCmAfAmUfCmUfGmUf | AGUAGCAUUCCAAUCUGUA | OOOOOOOOOOOOOOOOOO |
| | A | | |
| WV-38593 | mCmCfAmCfAmGfAfAfUmAfUmCfAmAfCmAfAmGf | CCACAGAAUAUCAACAAGA | OOOOOOOOOOOOOOOOOO |
| | A | | |
| WV-38594 | mCmAfCmAfGmAfAfUfAmUfCmAfAmCfAmAfGmAf | CACAGAAUAUCAACAAGAA | OOOOOOOOOOOOOOOOOO |
| | A | | |
| WV-38595 | mCmAfGmAfAmUfAfUfCmAfAmCfAmAfGmAfAmCf | CAGAAUAUCAACAAGAACA | OOOOOOOOOOOOOOOOOO |
| | A | | |
| WV-38596 | mGmAfAmUfAmUfCfAfAmCfAmAfGmAfAmCfAmCf | GAAUAUCAACAAGAACACA | OOOOOOOOOOOOOOOOOO |
| | A | | |
| WV-38597 | mCmAfAmCfAmAfGfAfAmCfAmCfAmGfAmAfUmGf | CAACAAGAACACAGAAUGA | OOOOOOOOOOOOOOOOOO |
| | A | | |
| WV-38598 | mCmAfGmAfAmUfGfAfGmUfGmCfAmCfAmGfCmUf | CAGAAUGAGUGCACAGCUA | OOOOOOOOOOOOOOOOOO |
| | A | | |
| WV-38599 | mAmGfAmAfUmGfAfGfUmGfCmAfCmAfGmCfUmAf | AGAAUGAGUGCACAGCUAA | OOOOOOOOOOOOOOOOOO |
| | A | | |
| WV-38600 | mCmAfUmUfUmGfAfAfAmGfAmUfUmUfCmCfCmUf | CAUUUGAAAGAUUUCCCUA | OOOOOOOOOOOOOOOOOO |
| | A | | |
| WV-38601 | mCmCfAmAfAmAfCfGfGmUfGmCfAmAfCmUfCmUf | CCAAAACGGUGCAACUCUA | OOOOOOOOOOOOOOOOOO |
| | A | | |
| WV-38602 | mGmGfUmGfCmAfAfCfUmCfUmAfUmUfCmUfGmGf | GGUGCAACUCUAUUCUGGA | OOOOOOOOOOOOOOOOOO |
| | A | | |
| WV-38603 | mGmCfAmAfCmUfCfUfAmUfUmCfUmGfGmAfCmUf | GCAACUCUAUUCUGGACUA | OOOOOOOOOOOOOOOOOO |
| | A | | |
| WV-38604 | mAmGfAmCfAmAfUfUfUmUfAmGfGmCfUmCfAmAf | AGACAAUUUUAGGCUCAAA | OOOOOOOOOOOOOOOOOO |
| | A | | |
| WV-38605 | mGmAfCmAfAmUfUfUfUmAfGmGfCmUfCmAfAmAf | GACAAUUUUAGGCUCAAAA | OOOOOOOOOOOOOOOOOO |
| | A | | |
| WV-38606 | mGmGfCmUfCmAfAfAfAmAfUmUfAmAfAmGfCmUf | GGCUCAAAAAUUAAAGCUA | OOOOOOOOOOOOOOOOOO |
| | A | | |
| WV-38607 | mGmCfUmCfAmAfAfAfAmUfUmAfAmAfGmCfUmAf | GCUCAAAAAUUAAAGCUAA | OOOOOOOOOOOOOOOOOO |
| | A | | |
| WV-38608 | mGmCfUmAfAmCfAfCfAmGfGmAfAmAfAmGfGmAf | GCUAACACAGGAAAAGGAA | OOOOOOOOOOOOOOOOOO |
| | A | | |
| WV-38609 | mGmGfAmAfCmUfGfUfAmCfUmGfGmCfUmAfUmUf | GGAACUGUACUGGCUAUU | OOOOOOOOOOOOOOOOOO |
| | A | A | |
| WV-38610 | mCmCfCmAfCmUfAfCfAmUfCmAfAmGfAmCfUmAf | CCCACUACAUCAAGACUAA | OOOOOOOOOOOOOOOOOO |
| | A | | |
| WV-41031 | Mod001L001mG*mGfCmUfUmUfCfAfCmAfGmAfG | GGCUUUCACAGAGGUCUGA | OXOOOOOOOOOOOOOOOOX |
| | mGfUmCfUmG*fA | | |
| WV-41032 | Mod001L001mC*mGfCmUfGmUfUfGfGmCfUmUfU | CGCUGUUGGCUUUCACAGA | OXOOOOOOOOOOOOOOOOX |
| | mCfAmCfAmG*fA | | |
| WV-41033 | Mod001L001mC*mUfUmUfCmAfCfAfGmAfGmGfU | CUUUCACAGAGGUCUGACA | OXOOOOOOOOOOOOOOOOX |
| | mCfUmGfAmC*fA | | |
| WV-41034 | Mod001L001mG*mGfGmAfAmAfAfAfCmUfGmGfU | GGGAAAAACUGGUAUCAAA | OXOOOOOOOOOOOOOOOOX |
| | mAfUmCfAmA*fA | | |
| WV-41035 | Mod001L001mA*mAfGmUfCmUfGfAfUmAfGmAfU | AAGUCUGAUAGAUGGAAU | OXOOOOOOOOOOOOOOOOX |
| | mGfGmAfAmU*fA | A | |
| WV-41036 | Mod001L001mG*mGfAmAfAmAfAfCfUmGfGmUfA | GGAAAAACUGGUAUCAAAA | OXOOOOOOOOOOOOOOOOX |
| | mUfCmAfAmA*fA | | |
| WV-41037 | Mod001L001mC*mAfAmGfAmUfUfAfUmGfGmCfC | CAAGAUUAUGGCCUGUAUA | OXOOOOOOOOOOOOOOOOX |
| | mUfGmUfAmU*fA | | |
| WV-41038 | Mod001L001mG*mGfAmUfCmAfCfAfAmAfAmGfCm | GGAUCACAAAAGCACUUCA | OXOOOOOOOOOOOOOOOOX |
| | AfCmUfUmC*fA | | |
| WV-41039 | Mod001L001mC*mAfAmUfAmAfGfAfAmAfAmUfG | CAAUAAGAAAAUGAUUUUA | OXOOOOOOOOOOOOOOOOX |
| | mAfUmUfUmU*fA | | |
| WV-41040 | Mod001L001mC*mCfAmUfAmUfUfGfUmUfCmCfA | CCAUAUUGUUCCAGCAAAA | OXOOOOOOOOOOOOOOOOX |
| | mGfCmAfAmA*fA | | |
| WV-41041 | Mod001L001mU*mAfGmAfUmGfGfAfAmUfAmCfU | UAGAUGGAAUACUUACCAA | OXOOOOOOOOOOOOOOOOX |
| | mUfAmCfCmA*fA | | |
| WV-41042 | Mod001L001mA*mCfAmAfGmAfUfUfAmUfGmGfC | ACAAGAUUAUGGCCUGUAA | OXOOOOOOOOOOOOOOOOX |
| | mCfUmGfUmA*fA | | |
| WV-41043 | Mod001L001mC*mCfCmAfUmAfUfUfGmUfUmCfC | CCCAUAUUGUUCCAGCAAA | OXOOOOOOOOOOOOOOOOX |
| | mAfGmCfAmA*fA | | |
| WV-41044 | Mod001L001mA*mCfAmGfAmUfGfAfAmGfUmCfG | ACAGAUGAAGUCGUAAGAA | OXOOOOOOOOOOOOOOOOX |
| | mUfAmAfGmA*fA | | |
| WV-41045 | Mod001L001mU*mGfUmAfUmUfGfGfAmGfAmCfA | UGUAUUGGAGACAGAUGA | OXOOOOOOOOOOOOOOOOX |
| | mGfAmUfGmA*fA | A | |
| WV-41046 | Mod001L001mC*mAfCmAfAmGfAfUfUmAfUmGfG | CACAAGAUUAUGGCCUGUA | OXOOOOOOOOOOOOOOOOX |
| | mCfCmUfGmU*fA | | |
| WV-41047 | Mod001L001mG*mAfAmGfUmCfGfUfAmAfGmAfA | GAAGUCGUAAGAAGUCUGA | OXOOOOOOOOOOOOOOOOX |
| | mGfUmCfUmG*fA | | |
| WV-41048 | Mod001L001mG*mUfAmUfCmAfAfAfAmCfCmUfCm | GUAUCAAAACCUCAUGUCA | OXOOOOOOOOOOOOOOOOX |
| | AfUmGfUmC*fA | | |
| WV-41049 | Mod001L001mG*mAfAmUfAmCfUfUfAmCfCmAfAm | GAAUACUUACCAAUAAGAA | OXOOOOOOOOOOOOOOOOX |
| | UfAmAfGmA*fA | | |
| WV-41050 | Mod001L001mA*mGfAmAfGmUfCfUfGmAfUmAfG | AGAAGUCUGAUAGAUGGA | OXOOOOOOOOOOOOOOOOX |
| | mAfUmGfGmA*fA | A | |
| WV-41051 | Mod001L001mA*mUfGmGfAmAfUfAfCmUfUmAfC | AUGGAAUACUUACCAAUAA | OXOOOOOOOOOOOOOOOOX |
| | mCfAmAfUmA*fA | | |
| WV-41052 | Mod001L001mG*mGfCmCfUmGfUfAfUmUfGmGfA | GGCCUGUAUUGGAGACAG | OXOOOOOOOOOOOOOOOOX |
| | mGfAmCfAmG*fA | A | |
| WV-41053 | Mod001L001mG*mGfGmUfUmCfAfCfCmAfAmAfA | GGGUUCACCAAAAAUCCAA | OXOOOOOOOOOOOOOOOOX |
| | mAfUmCfCmA*fA | | |
| WV-41054 | Mod001L001mG*mAfCmAfGmAfUfGfAmAfGmUfC | GACAGAUGAAGUCGUAAGA | OXOOOOOOOOOOOOOOOOX |
| | mGfUmAfAmG*fA | | |
| WV-41055 | Mod001L001mC*mUfGmAfUmAfGfAfUmGfGmAfA | CUGAUAGAUGGAAUACUU | OXOOOOOOOOOOOOOOOOX |
| | mUfAmCfUmU*fA | A | |
| WV-41056 | Mod001L001mG*mAfUmGfUmAfAfCfAmAfUmCfG | GAUGUAACAAUCGUGGUG | OXOOOOOOOOOOOOOOOOX |
| | mUfGmGfUmG*fA | A | |
| WV-41057 | Mod001L001mA*mGfAmAfGmUfGfGfGmUfGmAfU | AGAAGUGGGUGAUGUAAC | OXOOOOOOOOOOOOOOOOX |
| | mGfUmAfAmC*fA | A | |
| WV-41058 | Mod001L001mU*mAfAmCfAmAfUfCfGmUfGmGfU | UAACAAUCGUGGUGAAUAA | OXOOOOOOOOOOOOOOOOX |
| | mGfAmAfUmA*fA | | |
| WV-41059 | Mod001L001mC*mUfAmGfGmAfCfAfUmUfUmUfU | CUAGGACAUUUUUGGAUC | OXOOOOOOOOOOOOOOOOX |
| | mGfGmAfUmC*fA | A | |
| WV-41060 | Mod001L001mG*mGfAmAfUmAfCfUfUmAfCmCfA | GGAAUACUUACCAAUAAGA | OXOOOOOOOOOOOOOOOOX |
| | mAfUmAfAmG*fA | | |
| WV-41061 | Mod001L001mA*mAfUmCfAmAfUfGfCmUfGmCfA | AAUCAAUGCUGCAAAGCUA | OXOOOOOOOOOOOOOOOOX |
| | mAfAmGfCmU*fA | | |
| WV-41062 | Mod001L001mG*mUfCmUfGmAfCfAfUmCfAmGfA | GUCUGACAUCAGAACUUCA | OXOOOOOOOOOOOOOOOOX |
| | mAfCmUfUmC*fA | | |
| WV-41063 | Mod001L001mC*mAfCmCfAmAfGfGfAmUfGmAfAm | CACCAAGGAUGAAGAGAUA | OXOOOOOOOOOOOOOOOOX |
| | GfAmGfAmU*fA | | |
| WV-41064 | Mod001L001mG*mAfAmUfAmCfUfGfGmGfUmUfC | GAAUACUGGGUUCACCAAA | OXOOOOOOOOOOOOOOOOX |
| | mAfCmCfAmA*fA | | |
| WV-41065 | Mod001L001mC*mAfUmUfUmGfAfGfGmUfCmAfA | CAUUUGAGGUCAACAUCCA | OXOOOOOOOOOOOOOOOOX |
| | mCfAmUfCmC*fA | | |
| WV-41066 | L001mG*mGfCmUfUmUfCfAfCmAfGmAfGmGfUmCf | GGCUUUCACAGAGGUCUGA | OXOOOOOOOOOOOOOOOOX |
| | UmG*fA | | |
| WV-41067 | L001mC*mGfCmUfGmUfUfGfGmCfUmUfUmCfAmCf | CGCUGUUGGCUUUCACAGA | OXOOOOOOOOOOOOOOOOX |
| | AmG*fA | | |
| WV-41068 | L001mC*mUfUmUfCmAfCfAfGmAfGmGfUmCfUmGf | CUUUCACAGAGGUCUGACA | OXOOOOOOOOOOOOOOOOX |
| | AmC*fA | | |
| WV-41069 | L001mG*mGfGmAfAmAfAfAfCmUfGmGfUmAfUmCf | GGGAAAAACUGGUAUCAAA | OXOOOOOOOOOOOOOOOOX |
| | AmA*fA | | |
| WV-41070 | L001mA*mAfGmUfCmUfGfAfUmAfGmAfUmGfGmA | AAGUCUGAUAGAUGGAAU | OXOOOOOOOOOOOOOOOOX |
| | fAmU*fA | A | |
| WV-41071 | L001mG*mGfAmAfAmAfAfCfUmGfGmUfAmUfCmAf | GGAAAAACUGGUAUCAAAA | OXOOOOOOOOOOOOOOOOX |
| | AmA*fA | | |
| WV-41072 | L001mC*mAfAmGfAmUfUfAfUmGfGmCfCmUfGmUf | CAAGAUUAUGGCCUGUAUA | OXOOOOOOOOOOOOOOOOX |
| | AmU*fA | | |
| WV-41073 | L001mG*mGfAmUfCmAfCfAfAmAfAmGfCmAfCmUf | GGAUCACAAAAGCACUUCA | OXOOOOOOOOOOOOOOOOX |
| | UmC*fA | | |
| WV-41074 | L001mC*mAfAmUfAmAfGfAfAmAfAmUfGmAfUmUf | CAAUAAGAAAAUGAUUUUA | OXOOOOOOOOOOOOOOOOX |
| | UmU*fA | | |
| WV-41075 | L001mC*mCfAmUfAmUfUfGfUmUfCmCfAmGfCmAf | CCAUAUUGUUCCAGCAAAA | OXOOOOOOOOOOOOOOOOX |
| | AmA*fA | | |
| WV-41076 | L001mU*mAfGmAfUmGfGfAfAmUfAmCfUmUfAmCf | UAGAUGGAAUACUUACCAA | OXOOOOOOOOOOOOOOOOX |
| | CmA*fA | | |
| WV-41077 | L001mA*mCfAmAfGmAfUfUfAmUfGmGfCmCfUmGf | ACAAGAUUAUGGCCUGUAA | OXOOOOOOOOOOOOOOOOX |
| | UmA*fA | | |
| WV-41078 | L001mC*mCfCmAfUmAfUfUfGmUfUmCfCmAfGmCf | CCCAUAUUGUUCCAGCAAA | OXOOOOOOOOOOOOOOOOX |
| | AmA*fA | | |
| WV-41079 | L001mA*mCfAmGfAmUfGfAfAmGfUmCfGmUfAmAf | ACAGAUGAAGUCGUAAGAA | OXOOOOOOOOOOOOOOOOX |
| | GmA*fA | | |
| WV-41080 | L001mU*mGfUmAfUmUfGfGfAmGfAmCfAmGfAmU | UGUAUUGGAGACAGAUGA | OXOOOOOOOOOOOOOOOOX |
| | fGmA*fA | A | |
| WV-41081 | L001mC*mAfCmAfAmGfAfUfUmAfUmGfGmCfCmUf | CACAAGAUUAUGGCCUGUA | OXOOOOOOOOOOOOOOOOX |
| | GmU*fA | | |
| WV-41082 | L001mG*mAfAmGfUmCfGfUfAmAfGmAfAmGfUmCf | GAAGUCGUAAGAAGUCUGA | OXOOOOOOOOOOOOOOOOX |
| | UmG*fA | | |
| WV-41083 | L001mG*mUfAmUfCmAfAfAfAmCfCmUfCmAfUmGf | GUAUCAAAACCUCAUGUCA | OXOOOOOOOOOOOOOOOOX |
| | UmC*fA | | |
| WV-41084 | L001mG*mAfAmUfAmCfUfUfAmCfCmAfAmUfAmAf | GAAUACUUACCAAUAAGAA | OXOOOOOOOOOOOOOOOOX |
| | GmA*fA | | |
| WV-41085 | L001mA*mGfAmAfGmUfCfUfGmAfUmAfGmAfUmG | AGAAGUCUGAUAGAUGGA | OXOOOOOOOOOOOOOOOOX |
| | fGmA*fA | A | |
| WV-41086 | L001mA*mUfGmGfAmAfUfAfCmUfUmAfCmCfAmAf | AUGGAAUACUUACCAAUAA | OXOOOOOOOOOOOOOOOOX |
| | UmA*fA | | |
| WV-41087 | L001mG*mGfCmCfUmGfUfAfUmUfGmGfAmGfAmC | GGCCUGUAUUGGAGACAG | OXOOOOOOOOOOOOOOOOX |
| | fAmG*fA | A | |
| WV-41088 | L001mG*mGfGmUfUmCfAfCfCmAfAmAfAmAfUmCf | GGGUUCACCAAAAAUCCAA | OXOOOOOOOOOOOOOOOOX |
| | CmA*fA | | |
| WV-41089 | L001mG*mAfCmAfGmAfUfGfAmAfGmUfCmGfUmAf | GACAGAUGAAGUCGUAAGA | OXOOOOOOOOOOOOOOOOX |
| | AmG*fA | | |
| WV-41090 | L001mC*mUfGmAfUmAfGfAfUmGfGmAfAmUfAmCf | CUGAUAGAUGGAAUACUU | OXOOOOOOOOOOOOOOOOX |
| | UmU*fA | A | |
| WV-41091 | L001mG*mAfUmGfUmAfAfCfAmAfUmCfGmUfGmG | GAUGUAACAAUCGUGGUG | OXOOOOOOOOOOOOOOOOX |
| | fUmG*fA | A | |
| WV-41092 | L001mA*mGfAmAfGmUfGfGfGmUfGmAfUmGfUmA | AGAAGUGGGUGAUGUAAC | OXOOOOOOOOOOOOOOOOX |
| | fAmC*fA | A | |
| WV-41093 | L001mU*mAfAmCfAmAfUfCfGmUfGmGfUmGfAmAf | UAACAAUCGUGGUGAAUAA | OXOOOOOOOOOOOOOOOOX |
| | UmA*fA | | |
| WV-41094 | L001mC*mUfAmGfGmAfCfAfUmUfUmUfUmGfGmA | CUAGGACAUUUUUGGAUC | OXOOOOOOOOOOOOOOOOX |
| | fUmC*fA | A | |
| WV-41095 | L001mG*mGfAmAfUmAfCfUfUmAfCmCfAmAfUmAf | GGAAUACUUACCAAUAAGA | OXOOOOOOOOOOOOOOOOX |
| | AmG*fA | | |
| WV-41096 | L001mA*mAfUmCfAmAfUfGfCmUfGmCfAmAfAmGf | AAUCAAUGCUGCAAAGCUA | OXOOOOOOOOOOOOOOOOX |
| | CmU*fA | | |
| WV-41097 | L001mG*mUfCmUfGmAfCfAfUmCfAmGfAmAfCmUf | GUCUGACAUCAGAACUUCA | OXOOOOOOOOOOOOOOOOX |
| | UmC*fA | | |
| WV-41098 | L001mC*mAfCmCfAmAfGfGfAmUfGmAfAmGfAmGf | CACCAAGGAUGAAGAGAUA | OXOOOOOOOOOOOOOOOOX |
| | AmU*fA | | |
| WV-41099 | L001mG*mAfAmUfAmCfUfGfGmGfUmUfCmAfCmCf | GAAUACUGGGUUCACCAAA | OXOOOOOOOOOOOOOOOOX |
| | AmA*fA | | |
| WV-41100 | L001mC*mAfUmUfUmGfAfGfGmUfCmAfAmCfAmUf | CAUUUGAGGUCAACAUCCA | OXOOOOOOOOOOOOOOOOX |
| | CmC*fA | | |
| WV-42129 | fU*fU*mGfCmUfGmCfAmGfUmCmUmAfCmCfAmCf | UUGCUGCAGUCUACCACAU | XXOOOOOOOOOOOOOOOOXX |
| | AmU*mU*mU | UU | |
| WV-42130 | fU*fG*mUfUmGfCmUfGmCfAmGmUmCfUmAfCmCf | UGUUGCUGCAGUCUACCAC | XXOOOOOOOOOOOOOOOOXX |
| | AmC*mU*mU | UU | |
| WV-42131 | fU*fU*mGfUmUfGmCfUmGfCmAmGmUfCmUfAmC | UUGUUGCUGCAGUCUACCA | XXOOOOOOOOOOOOOOOOXX |
| | fCmA*mU*mU | UU | |
| WV-42132 | fU*fC*mUfGmUfUmGfCmUfGmCmAmGfUmCfUmA | UCUGUUGCUGCAGUCUACC | XXOOOOOOOOOOOOOOOOXX |
| | fCmC*mU*mU | UU | |
| WV-42133 | fU*fU*mCfUmGfUmUfGmCfUmGmCmAfGmUfCmU | UUCUGUUGCUGCAGUCUA | XXOOOOOOOOOOOOOOOOXX |
| | fAmC*mU*mU | CUU | |
| WV-42134 | fU*fC*mUfCmUfGmUfUmGfCmUmGmCfAmGfUmCf | UCUCUGUUGCUGCAGUCU | XXOOOOOOOOOOOOOOOOXX |
| | UmA*mU*mU | AUU | |
| WV-42135 | fU*fU*mCfUmCfUmGfUmUfGmCmUmGfCmAfGmU | UUCUCUGUUGCUGCAGUC | XXOOOOOOOOOOOOOOOOXX |
| | fCmU*mU*mU | UUU | |
| WV-42136 | fU*fU*mUfCmUfCmUfGmUfUmGmCmUfGmCfAmG | UUUCUCUGUUGCUGCAGU | XXOOOOOOOOOOOOOOOOXX |
| | fUmC*mU*mU | CUU | |
| WV-42137 | fU*fC*mAfAmAfAmAfUmGfUmCmCmUfAmGfGmAf | UCAAAAAUGUCCUAGGAUG | XXOOOOOOOOOOOOOOOOXX |
| | UmG*mU*mU | UU | |
| WV-42138 | fU*fC*mCfAmAfAmAfAmUfGmUmCmCfUmAfGmGf | UCCAAAAAUGUCCUAGGAU | XXOOOOOOOOOOOOOOOOXX |
| | AmU*mU*mU | UU | |
| WV-42139 | fU*fU*mCfCmAfAmAfAmAfUmGmUmCfCmUfAmGf | UUCCAAAAAUGUCCUAGGA | XXOOOOOOOOOOOOOOOOXX |
| | GmA*mU*mU | UU | |
| WV-42140 | fU*fU*mCfUmGfCmAfUmAfCmGmAmUfUmUfAmAf | UUCUGCAUACGAUUUAAAA | XXOOOOOOOOOOOOOOOOXX |
| | AmA*mU*mU | UU | |
| WV-42141 | fU*fA*mUfUmCfUmGfCmAfUmAmCmGfAmUfUmU | UAUUCUGCAUACGAUUUAA | XXOOOOOOOOOOOOOOOOXX |
| | fAmA*mU*mU | UU | |
| WV-42142 | fU*fA*mUfAmUfUmCfUmGfCmAmUmAfCmGfAmUf | UAUAUUCUGCAUACGAUU | XXOOOOOOOOOOOOOOOOXX |
| | UmU*mU*mU | UUU | |
| WV-42143 | fU*fA*mAfUmAfUmUfCmUfGmCmAmUfAmCfGmAf | UAAUAUUCUGCAUACGAUU | XXOOOOOOOOOOOOOOOOXX |
| | UmU+mU*mU | UU | |
| WV-42144 | fU*fG*mAfAmUfAmUfUmCfUmGmCmAfUmAfCmGf | UGAAUAUUCUGCAUACGAU | XXOOOOOOOOOOOOOOOOXX |
| | AmU*mU*mU | UU | |
| WV-42145 | fU*fU*mGfAmAfUmAfUmUfCmUmGmCfAmUfAmCf | UUGAAUAUUCUGCAUACGA | XXOOOOOOOOOOOOOOOOXX |
| | GmA*mU*mU | UU | |
| WV-42146 | fU*fU*mUfGmAfAmUfAmUfUmCmUmGfCmAfUmA | UUUGAAUAUUCUGCAUAC | XXOOOOOOOOOOOOOOOOXX |
| | fCmG*mU*mU | GUU | |
| WV-42147 | fU*fA*mAfUmUfGmAfAmUfAmUmUmCfUmGfCmAf | UAAUUGAAUAUUCUGCAU | XXOOOOOOOOOOOOOOOOXX |
| | UmA*mU*mU | AUU | |
| WV-42148 | fU*fC*mAfAmAfUmUfGmAfAmUmAmUfUmCfUmGf | UCAAAUUGAAUAUUCUGCA | XXOOOOOOOOOOOOOOOOXX |
| | CmA*mU*mU | UU | |
| WV-42149 | fU*fA*mAfGmUfCmCfAmGfAmAmUmAfGmAfGmUf | UAAGUCCAGAAUAGAGUU | XXOOOOOOOOOOOOOOOOXX |
| | UmG*mU*mU | GUU | |
| WV-42150 | fU*fA*mAfAmGfUmCfCmAfGmAmAmUfAmGfAmGf | UAAAGUCCAGAAUAGAGUU | XXOOOOOOOOOOOOOOOOXX |
| | UmU*mU*mU | UU | |
| WV-42151 | fU*fU*mAfAmAfGmUfCmCfAmGmAmAfUmAfGmAf | UUAAAGUCCAGAAUAGAGU | XXOOOOOOOOOOOOOOOOXX |
| | GmU*mU*mU | UU | |
| WV-42152 | fU*fA*mAfUmAfAmAfGmUfCmCmAmGfAmAfUmAf | UAAUAAAGUCCAGAAUAGA | XXOOOOOOOOOOOOOOOOXX |
| | GmA*mU*mU | UU | |
| WV-42153 | fU*fC*mAfAmGfUmAfAmUfAmAmAmGfUmCfCmAf | UCAAGUAAUAAAGUCCAGA | XXOOOOOOOOOOOOOOOOXX |
| | GmA*mU*mU | UU | |
| WV-42154 | fU*fG*mAfGmGfGmUfCmCfAmCmUmUfUmUfGmG | UGAGGGUCCACUUUUGGU | XXOOOOOOOOOOOOOOOOXX |
| | fUmG*mU*mU | GUU | |
| WV-42155 | fU*fA*mGfAmGfGmGfUmCfCmAmCmUfUmUfUmG | UAGAGGGUCCACUUUUGG | XXOOOOOOOOOOOOOOOOXX |
| | fGmU*mU*mU | UUU | |
| WV-42156 | fU*fU*mAfGmAfGmGfGmUfCmCmAmCfUmUfUmU | UUAGAGGGUCCACUUUUG | XXOOOOOOOOOOOOOOOOXX |
| | fGmG*mU*mU | GUU | |
| WV-42157 | fU*fA*mUfAmGfAmGfGmGfUmCmCmAfCmUfUmUf | UAUAGAGGGUCCACUUUU | XXOOOOOOOOOOOOOOOOXX |
| | UmG*mU*mU | GUU | |
| WV-42158 | fU*fU*mAfUmAfGmAfGmGfGmUmCmCfAmCfUmUf | UUAUAGAGGGUCCACUUU | XXOOOOOOOOOOOOOOOOXX |
| | UmU*mU*mU | UUU | |
| WV-42159 | fU*fA*mAfGmGfGmAfGmGfAmAmAmUfAmUfAmG | UAAGGGAGGAAAUAUAGA | XXOOOOOOOOOOOOOOOOXX |
| | fAmG*mU*mU | GUU | |
| WV-42160 | fU*fU*mGfAmGfCmCfUmAfAmAmAmUfUmGfUmCf | UUGAGCCUAAAAUUGUCUA | XXOOOOOOOOOOOOOOOOXX |
| | UmA*mU*mU | UU | |
| WV-42161 | fU*fU*mUfUmUfGmAfGmCfCmUmAmAfAmAfUmU | UUUUUGAGCCUAAAAUUG | XXOOOOOOOOOOOOOOOOXX |
| | fGmU*mU*mU | UUU | |
| WV-42162 | fU*fA*mCfAmGfUmUfCmCfUmUmUmUfCmCfUmGf | UACAGUUCCUUUUCCUGU | XXOOOOOOOOOOOOOOOOXX |
| | UmG*mU*mU | GUU | |
| WV-42163 | fU*fU*mAfAmUfAmGfCmCfAmGmUmAfCmAfGmUf | UUAAUAGCCAGUACAGUUC | XXOOOOOOOOOOOOOOOOXX |
| | UmC*mU*mU | UU | |
| WV-42164 | fU*fG*mUfAmAfUmAfGmCfCmAmGmUfAmCfAmGf | UGUAAUAGCCAGUACAGUU | XXOOOOOOOOOOOOOOOOXX |
| | UmU*mU*mU | UU | |
| WV-42165 | fU*fA*mGfUmGfGmGfAmGfUmCmGmGfAmUfUmA | UAGUGGGAGUCGGAUUAU | XXOOOOOOOOOOOOOOOOXX |
| | fUmU*mU*mU | UUU | |
| WV-42166 | fU*fG*mUfAmGfUmGfGmGfAmGmUmCfGmGfAmU | UGUAGUGGGAGUCGGAUU | XXOOOOOOOOOOOOOOOOXX |
| | fUmA*mU*mU | AUU | |
| WV-42167 | fU*fU*mGfUmAfGmUfGmGfGmAmGmUfCmGfGmA | UUGUAGUGGGAGUCGGAU | XXOOOOOOOOOOOOOOOOXX |
| | fUmU*mU*mU | UUU | |
| WV-42168 | fU*fG*mAfUmGfUmAfGmUfGmGmGmAfGmUfCmG | UGAUGUAGUGGGAGUCGG | XXOOOOOOOOOOOOOOOOXX |
| | fGmA*mU*mU | AUU | |
| WV-42169 | fU*fU+mGfAmUfGmUfAmGfUmGmGmGfAmGfUmC | UUGAUGUAGUGGGAGUCG | XXOOOOOOOOOOOOOOOOXX |
| | fGmG*mU*mU | GUU | |
| WV-42170 | fU*fU*mUfGmAfUmGfUmAfGmUmGmGfGmAfGm | UUUGAUGUAGUGGGAGUC | XXOOOOOOOOOOOOOOOOXX |
| | UfCmG*mU*mU | GUU | |
| WV-42171 | fU*fC*mUfUmGfAmUfGmUfAmGmUmGfGmGfAmG | UCUUGAUGUAGUGGGAGU | XXOOOOOOOOOOOOOOOOXX |
| | fUmC*mU*mU | CUU | |
| WV-42172 | fU*fU*mCfUmUfGmAfUmGfUmAmGmUfGmGfGmA | UUCUUGAUGUAGUGGGAG | XXOOOOOOOOOOOOOOOOXX |
| | fGmU*mU*mU | UUU | |
| WV-42173 | fU*fG*mUfCmUfUmGfAmUfGmUmAmGfUmGfGmG | UGUCUUGAUGUAGUGGGA | XXOOOOOOOOOOOOOOOOXX |
| | fAmG*mU*mU | GUU | |
| WV-42174 | fU*fA*mGfUmCfUmUfGmAfUmGmUmAfGmUfGmG | UAGUCUUGAUGUAGUGGG | XXOOOOOOOOOOOOOOOOXX |
| | fGmA*mU*mU | AUU | |
| WV-42175 | fU*fU*mUfAmGfUmCfUmUfGmAmUmGfUmAfGmU | UUUAGUCUUGAUGUAGUG | XXOOOOOOOOOOOOOOOOXX |
| | fGmG*mU*mU | GUU | |
| WV-42176 | fU*fA*mUfUmAfGmUfCmUfUmGmAmUfGmUfAmG | UAUUAGUCUUGAUGUAGU | XXOOOOOOOOOOOOOOOOXX |
| | fUmG*mU*mU | GUU | |
| WV-42177 | fU*fG*mAfUmUfAmGfUmCfUmUmGmAfUmGfUmA | UGAUUAGUCUUGAUGUAG | XXOOOOOOOOOOOOOOOOXX |
| | fGmU*mU*mU | UUU | |
| WV-42178 | fU*fA*mGfAmUfUmAfGmUfCmUmUmGfAmUfGmU | UAGAUUAGUCUUGAUGUA | XXOOOOOOOOOOOOOOOOXX |
| | fAmG*mU*mU | GUU | |
| WV-42179 | fU*fC*mAfAmGfAmUfUmAfGmUmCmUfUmGfAmU | UCAAGAUUAGUCUUGAUG | XXOOOOOOOOOOOOOOOOXX |
| | fGmU*mU*mU | UUU | |
| WV-42180 | fU*fA*mCfAmAfGmAfUmUfAmGmUmCfUmUfGmAf | UACAAGAUUAGUCUUGAU | XXOOOOOOOOOOOOOOOOXX |
| | UmG*mU*mU | GUU | |
| WV-42181 | fU*fA+mCfAmUfGmUfGmAfAmAmAmAfCmAfCmAf | UACAUGUGAAAAACACACA | XXOOOOOOOOOOOOOOOOXX |
| | CmA*mU*mU | UU | |
| WV-42182 | fU*fA*mUfAmCfAmUfGmUfGmAmAmAfAmAfCmAf | UAUACAUGUGAAAAACACA | XXOOOOOOOOOOOOOOOOXX |
| | CmA*mU*mU | UU | |
| WV-42183 | fU+fA*mAfUmAfCmAfUmGfUmGmAmAfAmAfAmCf | UAAUACAUGUGAAAAACAC | XXOOOOOOOOOOOOOOOOXX |
| | AmC*mU*mU | UU | |
| WV-42184 | fU*fA*mUfAmAfUmAfCmAfUmGmUmGfAmAfAmAf | UAUAAUACAUGUGAAAAAC | XXOOOOOOOOOOOOOOOOXX |
| | AmC*mU*mU | UU | |
| WV-42185 | fU*fC*mUfAmUfAmAfUmAfCmAmUmGfUmGfAmAf | UCUAUAAUACAUGUGAAAA | XXOOOOOOOOOOOOOOOOXX |
| | AmA*mU*mU | UU | |
| WV-42186 | fU*fU*mCfUmAfUmAfAmUfAmCmAmUfGmUfGmAf | UUCUAUAAUACAUGUGAAA | XXOOOOOOOOOOOOOOOOXX |
| | AmA*mU*mU | UU | |
| WV-42187 | fU*fG*mCfAmUfUmCfUmAfUmAmAmUfAmCfAmUf | UGCAUUCUAUAAUACAUGU | XXOOOOOOOOOOOOOOOOXX |
| | GmU*mU*mU | UU | |
| WV-42188 | fU*fA*mAfGmCfAmUfUmCfUmAmUmAfAmUfAmCf | UAAGCAUUCUAUAAUACAU | XXOOOOOOOOOOOOOOOOXX |
| | AmU*mU*mU | UU | |
| WV-42189 | fU*fC*mAfAmAfAmGfCmAfUmUmCmUfAmUfAmAf | UCAAAAGCAUUCUAUAAUA | XXOOOOOOOOOOOOOOOOXX |
| | UmA*mU*mU | UU | |
| WV-42190 | fU*fA*mUfGmCfAmAfAmAfGmCmAmUfUmCfUmAf | UAUGCAAAAGCAUUCUAUA | XXOOOOOOOOOOOOOOOOXX |
| | UmA*mU*mU | UU | |
| WV-42191 | fU*fC*mCfAmUfGmCfAmAfAmAmGmCfAmUfUmCf | UCCAUGCAAAAGCAUUCUA | XXOOOOOOOOOOOOOOOOXX |
| | UmA*mU*mU | UU | |
| WV-42192 | fU*fU*mCfCmAfUmGfCmAfAmAmAmGfCmAfUmUf | UUCCAUGCAAAAGCAUUCU | XXOOOOOOOOOOOOOOOOXX |
| | CmU*mU*mU | UU | |
| WV-42193 | fU*fG*mUfCmCfAmUfGmCfAmAmAmAfGmCfAmUf | UGUCCAUGCAAAAGCAUUC | XXOOOOOOOOOOOOOOOOXX |
| | UmC*mU*mU | UU | |
| WV-42194 | fU*fA*mGfUmCfCmAfUmGfCmAmAmAfAmGfCmAf | UAGUCCAUGCAAAAGCAUU | XXOOOOOOOOOOOOOOOOXX |
| | UmU*mU*mU | UU | |
| WV-42195 | fU*fU*mAfGmUfCmCfAmUfGmCmAmAfAmAfGmCf | UUAGUCCAUGCAAAAGCAU | XXOOOOOOOOOOOOOOOOXX |
| | AmU*mU*mU | UU | |
| WV-42196 | fU*fG*mAfUmAfGmUfCmCfAmUmGmCfAmAfAmAf | UGAUAGUCCAUGCAAAAGC | XXOOOOOOOOOOOOOOOOXX |
| | GmC*mU*mU | UU | |
| WV-42197 | fU*fG*mGfAmUfAmGfUmCfCmAmUmGfCmAfAmAf | UGGAUAGUCCAUGCAAAAG | XXOOOOOOOOOOOOOOOOXX |
| | AmG*mU*mU | UU | |
| WV-42198 | fU*fA*mGfGmAfUmAfGmUfCmCmAmUfGmCfAmAf | UAGGAUAGUCCAUGCAAAA | XXOOOOOOOOOOOOOOOOXX |
| | AmA*mU*mU | UU | |
| WV-42199 | fU*fA*mGfAmGfGmAfUmAfGmUmCmCfAmUfGmCf | UAGAGGAUAGUCCAUGCAA | XXOOOOOOOOOOOOOOOOXX |
| | AmA*mU*mU | UU | |
| WV-42200 | fU*fA*mAfGmAfGmGfAmUfAmGmUmCfCmAfUmGf | UAAGAGGAUAGUCCAUGCA | XXOOOOOOOOOOOOOOOOXX |
| | CmA*mU*mU | UU | |
| WV-42201 | fU*fC*mAfAmGfAmGfGmAfUmAmGmUfCmCfAmUf | UCAAGAGGAUAGUCCAUGC | XXOOOOOOOOOOOOOOOOXX |
| | GmC*mU*mU | UU | |
| WV-42202 | fU*fA*mCfAmAfGmAfGmGfAmUmAmGfUmCfCmAf | UACAAGAGGAUAGUCCAUG | XXOOOOOOOOOOOOOOOOXX |
| | UmG*mU*mU | UU | |
| WV-42203 | fU*fA*mAfCmAfAmGfAmGfGmAmUmAfGmUfCmCf | UAACAAGAGGAUAGUCCAU | XXOOOOOOOOOOOOOOOOXX |
| | AmU*mU*mU | UU | |
| WV-42204 | fU*fA*mAfAmCfAmAfGmAfGmGmAmUfAmGfUmCf | UAAACAAGAGGAUAGUCCA | XXOOOOOOOOOOOOOOOOXX |
| | CmA*mU*mU | UU | |
| WV-42205 | fU*fA*mAfAmAfAmCfAmAfGmAmGmGfAmUfAmGf | UAAAAACAAGAGGAUAGUC | XXOOOOOOOOOOOOOOOOXX |
| | UmC*mU*mU | UU | |
| WV-42206 | fU*fA*mAfUmAfAmAfAmAfCmAmAmGfAmGfGmAf | UAAUAAAAACAAGAGGAUA | XXOOOOOOOOOOOOOOOOXX |
| | UmA*mU*mU | UU | |
| WV-42207 | fU*fU*mAfAmUfAmAfAmAfAmCmAmAfGmAfGmGf | UUAAUAAAAACAAGAGGAU | XXOOOOOOOOOOOOOOOOXX |
| | AmU*mU*mU | UU | |
| WV-42208 | fU*fU*mUfAmAfUmAfAmAfAmAmCmAfAmGfAmGf | UUUAAUAAAAACAAGAGGA | XXOOOOOOOOOOOOOOOOXX |
| | GmA*mU*mU | UU | |
| WV-42209 | fU*fC*mAfUmUfUmGfUmUfUmUmUmAfAmUfAmA | UCAUUUGUUUUUAAUAAA | XXOOOOOOOOOOOOOOOOXX |
| | fAmA*mU*mU | AUU | |
| WV-42210 | fU*fA*mAfUmCfAmUfUmUfGmUmUmUfUmUfAmA | UAAUCAUUUGUUUUUAAU | XXOOOOOOOOOOOOOOOOXX |
| | fUmA*mU*mU | AUU | |
| WV-42211 | fU*fA*mAfAmUfCmAfUmUfUmGmUmUfUmUfUmA | UAAAUCAUUUGUUUUUAA | XXOOOOOOOOOOOOOOOOXX |
| | fAmU*mU*mU | UUU | |
| WV-42212 | fU*fA*mCfUmAfCmAfAmGfAmGmGmUfUmAfUmUf | UACUACAAGAGGUUAUUU | XXOOOOOOOOOOOOOOOOXX |
| | UmU*mU*mU | UUU | |
| WV-42213 | fU*fA+mAfCmUfAmCfAmAfGmAmGmGfUmUfAmUf | UAACUACAAGAGGUUAUU | XXOOOOOOOOOOOOOOOOXX |
| | UmU*mU*mU | UUU | |
| WV-42214 | fU*fU*mAfAmCfUmAfCmAfAmGmAmGfGmUfUmAf | UUAACUACAAGAGGUUAU | XXOOOOOOOOOOOOOOOOXX |
| | UmU*mU*mU | UUU | |
| WV-42215 | fU*fA*mUfAmAfCmUfAmCfAmAmGmAfGmGfUmUf | UAUAACUACAAGAGGUUAU | XXOOOOOOOOOOOOOOOOXX |
| | AmU*mU*mU | UU | |
| WV-42216 | fU*fU*mAfUmAfAmCfUmAfCmAmAmGfAmGfGmUf | UUAUAACUACAAGAGGUUA | XXOOOOOOOOOOOOOOOOXX |
| | UmA*mU*mU | UU | |
| WV-42217 | fU*fU*mUfAmUfAmAfCmUfAmCmAmAfGmAfGmGf | UUUAUAACUACAAGAGGU | XXOOOOOOOOOOOOOOOOXX |
| | UmU*mU*mU | UUU | |
| WV-42218 | fU*fA*mCfGmUfUmUfUmAfUmUmUmUfAmUfAmA | UACGUUUUAUUUUAUAAC | XXOOOOOOOOOOOOOOOOXX |
| | fCmU*mU*mU | UUU | |
| WV-42219 | mAmUfGmUfGmGfUfAfGmAfCmUfGmCfAmGfCmAf | AUGUGGUAGACUGCAGCAA | OOOOOOOOOOOOOOOOOO |
| | A | | |
| WV-42220 | mGmUfGmGfUmAfGfAfCmUfGmCfAmGfCmAfAmCf | GUGGUAGACUGCAGCAACA | OOOOOOOOOOOOOOOOOO |
| | A | | |
| WV-42221 | mUmGfGmUfAmGfAfCfUmGfCmAfGmCfAmAfCmAf | UGGUAGACUGCAGCAACAA | OOOOOOOOOOOOOOOOOO |
| | A | | |
| WV-42222 | mGmGfUmAfGmAfCfUfGmCfAmGfCmAfAmCfAmGf | GGUAGACUGCAGCAACAGA | OOOOOOOOOOOOOOOOOO |
| | A | | |
| WV-42223 | mGmUfAmGfAmCfUfGfCmAfGmCfAmAfCmAfGmAf | GUAGACUGCAGCAACAGAA | OOOOOOOOOOOOOOOOOO |
| | A | | |
| WV-42224 | mUmAfGmAfCmUfGfCfAmGfCmAfAmCfAmGfAmGf | UAGACUGCAGCAACAGAGA | OOOOOOOOOOOOOOOOOO |
| | A | | |
| WV-42225 | mAmGfAmCfUmGfCfAfGmCfAmAfCmAfGmAfGmAf | AGACUGCAGCAACAGAGAA | OOOOOOOOOOOOOOOOOO |
| | A | | |
| WV-42226 | mGmAfCmUfGmCfAfGfCmAfAmCfAmGfAmGfAmAf | GACUGCAGCAACAGAGAAA | OOOOOOOOOOOOOOOOOO |
| | A | | |
| WV-42227 | mCmAfUmCfCmUfAfGfGmAfCmAfUmUfUmUfUmGf | CAUCCUAGGACAUUUUUGA | OOOOOOOOOOOOOOOOOO |
| | A | | |
| WV-42228 | mAmUfCmCfUmAfGfGfAmCfAmUfUmUfUmUfGmGf | AUCCUAGGACAUUUUUGG | OOOOOOOOOOOOOOOOOO |
| | A | A | |
| WV-42229 | mUmCfCmUfAmGfGfAfCmAfUmUfUmUfUmGfGmAf | UCCUAGGACAUUUUUGGA | OOOOOOOOOOOOOOOOOO |
| | A | A | |
| WV-42230 | mUmUfUmUfAmAfAfUfCmGfUmAfUmGfCmAfGmAf | UUUUAAAUCGUAUGCAGA | OOOOOOOOOOOOOOOOOO |
| | A | A | |
| WV-42231 | mUmUfAmAfAmUfCfGfUmAfUmGfCmAfGmAfAmUf | UUAAAUCGUAUGCAGAAUA | OOOOOOOOOOOOOOOOOO |
| | A | | |
| WV-42232 | mAmAfAmUfCmGfUfAfUmGfCmAfGmAfAmUfAmUf | AAAUCGUAUGCAGAAUAUA | OOOOOOOOOOOOOOOOOO |
| | A | | |
| WV-42233 | mAmAfUmCfGmUfAfUfGmCfAmGfAmAfUmAfUmUf | AAUCGUAUGCAGAAUAUUA | OOOOOOOOOOOOOOOOOO |
| | A | | |
| WV-42234 | mAmUfCmGfUmAfUfGfCmAfGmAfAmUfAmUfUmCf | AUCGUAUGCAGAAUAUUCA | OOOOOOOOOOOOOOOOOO |
| | A | | |
| WV-42235 | mUmCfGmUfAmUfGfCfAmGfAmAfUmAfUmUfCmAf | UCGUAUGCAGAAUAUUCAA | OOOOOOOOOOOOOOOOOO |
| | A | | |
| WV-42236 | mCmGfUmAfUmGfCfAfGmAfAmUfAmUfUmCfAmAf | CGUAUGCAGAAUAUUCAAA | OOOOOOOOOOOOOOOOOO |
| | A | | |
| WV-42237 | mUmAfUmGfCmAfGfAfAmUfAmUfUmCfAmAfUmUf | UAUGCAGAAUAUUCAAUUA | OOOOOOOOOOOOOOOOOO |
| | A | | |
| WV-42238 | mUmGfCmAfGmAfAfUfAmUfUmCfAmAfUmUfUmGf | UGCAGAAUAUUCAAUUUG | OOOOOOOOOOOOOOOOOO |
| | A | A | |
| WV-42239 | mCmAfAmCfUmCfUfAfUmUfCmUfGmGfAmCfUmUf | CAACUCUAUUCUGGACUUA | OOOOOOOOOOOOOOOOOO |
| | A | | |
| WV-42240 | mAmAfCmUfCmUfAfUfUmCfUmGfGmAfCmUfUmUf | AACUCUAUUCUGGACUUUA | OOOOOOOOOOOOOOOOOO |
| | A | | |
| WV-42241 | mAmCfUmCfUmAfUfUfCmUfGmGfAmCfUmUfUmAf | ACUCUAUUCUGGACUUUAA | OOOOOOOOOOOOOOOOOO |
| | A | | |
| WV-42242 | mUmCfUmAfUmUfCfUfGmGfAmCfUmUfUmAfUmU | UCUAUUCUGGACUUUAUU | OOOOOOOOOOOOOOOOOO |
| | fA | A | |
| WV-42243 | mUmCfUmGfGmAfCfUfUmUfAmUfUmAfCmUfUmG | UCUGGACUUUAUUACUUG | OOOOOOOOOOOOOOOOOO |
| | fA | A | |
| WV-42244 | mCmAfCmCfAmAfAfAfGmUfGmGfAmCfCmCfUmCf | CACCAAAAGUGGACCCUCA | OOOOOOOOOOOOOOOOOO |
| | A | | |
| WV-42245 | mAmCfCmAfAmAfAfGfUmGfGmAfCmCfCmUfCmUf | ACCAAAAGUGGACCCUCUA | OOOOOOOOOOOOOOOOOO |
| | A | | |
| WV-42246 | mCmCfAmAfAmAfGfUfGmGfAmCfCmCfUmCfUmAf | CCAAAAGUGGACCCUCUAA | OOOOOOOOOOOOOOOOOO |
| | A | | |
| WV-42247 | mCmAfAmAfAmGfUfGfGmAfCmCfCmUfCmUfAmUf | CAAAAGUGGACCCUCUAUA | OOOOOOOOOOOOOOOOOO |
| | A | | |
| WV-42248 | mAmAfAmAfGmUfGfGfAmCfCmCfUmCfUmAfUmAf | AAAAGUGGACCCUCUAUAA | OOOOOOOOOOOOOOOOOO |
| | A | | |
| WV-42249 | mCmUfCmUfAmUfAfUfUmUfCmCfUmCfCmCfUmUf | CUCUAUAUUUCCUCCCUUA | OOOOOOOOOOOOOOOOOO |
| | A | | |
| WV-42250 | mUmAfGmAfCmAfAfUfUmUfUmAfGmGfCmUfCmAf | UAGACAAUUUUAGGCUCAA | OOOOOOOOOOOOOOOOOO |
| | A | | |
| WV-42251 | mAmCfAmAfUmUfUfUfAmGfGmCfUmCfAmAfAmAf | ACAAUUUUAGGCUCAAAAA | OOOOOOOOOOOOOOOOOO |
| | A | | |
| WV-42252 | mCmAfCmAfGmGfAfAfAmAfGmGfAmAfCmUfGmUf | CACAGGAAAAGGAACUGUA | OOOOOOOOOOOOOOOOOO |
| | A | | |
| WV-42253 | mGmAfAmCfUmGfUfAfCmUfGmGfCmUfAmUfUmAf | GAACUGUACUGGCUAUUAA | OOOOOOOOOOOOOOOOOO |
| | A | | |
| WV-42254 | mAmAfCmUfGmUfAfCfUmGfGmCfUmAfUmUfAmCf | AACUGUACUGGCUAUUACA | OOOOOOOOOOOOOOOOOO |
| | A | | |
| WV-42255 | mAmAfUmAfAmUfCfCfGmAfCmUfCmCfCmAfCmUf | AAUAAUCCGACUCCCACUA | OOOOOOOOOOOOOOOOOO |
| | A | | |
| WV-42256 | mUmAfAmUfCmCfGfAfCmUfCmCfCmAfCmUfAmCf | UAAUCCGACUCCCACUACA | OOOOOOOOOOOOOOOOOO |
| | A | | |
| WV-42257 | mAmAfUmCfCmGfAfCfUmCfCmCfAmCfUmAfCmAf | AAUCCGACUCCCACUACAA | OOOOOOOOOOOOOOOOOO |
| | A | | |
| WV-42258 | mUmCfCmGfAmCfUfCfCmCfAmCfUmAfCmAfUmCf | UCCGACUCCCACUACAUCA | OOOOOOOOOOOOOOOOOO |
| | A | | |
| WV-42259 | mCmCfGmAfCmUfCfCfCmAfCmUfAmCfAmUfCmAf | CCGACUCCCACUACAUCAA | OOOOOOOOOOOOOOOOOO |
| | A | | |
| WV-42260 | mCmGfAmCfUmCfCfCfAmCfUmAfCmAfUmCfAmAf | CGACUCCCACUACAUCAAA | OOOOOOOOOOOOOOOOOO |
| | A | | |
| WV-42261 | mGmAfCmUfCmCfCfAfCmUfAmCfAmUfCmAfAmGf | GACUCCCACUACAUCAAGA | OOOOOOOOOOOOOOOOOO |
| | A | | |
| WV-42262 | mAmCfUmCfCmCfAfCfUmAfCmAfUmCfAmAfGmAf | ACUCCCACUACAUCAAGAA | OOOOOOOOOOOOOOOOOO |
| | A | | |
| WV-42263 | mCmUfCmCfCmAfCfUfAmCfAmUfCmAfAmGfAmCf | CUCCCACUACAUCAAGACA | OOOOOOOOOOOOOOOOOO |
| | A | | |
| WV-42264 | mUmCfCmCfAmCfUfAfCmAfUmCfAmAfGmAfCmUf | UCCCACUACAUCAAGACUA | OOOOOOOOOOOOOOOOOO |
| | A | | |
| WV-42265 | mCmCfAmCfUmAfCfAfUmCfAmAfGmAfCmUfAmAf | CCACUACAUCAAGACUAAA | OOOOOOOOOOOOOOOOOO |
| | A | | |
| WV-42266 | mCmAfCmUfAmCfAfUfCmAfAmGfAmCfUmAfAmUf | CACUACAUCAAGACUAAUA | OOOOOOOOOOOOOOOOOO |
| | A | | |
| WV-42267 | mAmCfUmAfCmAfUfCfAmAfGmAfCmUfAmAfUmCf | ACUACAUCAAGACUAAUCA | OOOOOOOOOOOOOOOOOO |
| | A | | |
| WV-42268 | mCmUfAmCfAmUfCfAfAmGfAmCfUmAfAmUfCmUf | CUACAUCAAGACUAAUCUA | OOOOOOOOOOOOOOOOOO |
| | A | | |
| WV-42269 | mAmCfAmUfCmAfAfGfAmCfUmAfAmUfCmUfUmGf | ACAUCAAGACUAAUCUUGA | OOOOOOOOOOOOOOOOOO |
| | A | | |
| WV-42270 | mCmAfUmCfAmAfGfAfCmUfAmAfUmCfUmUfGmUf | CAUCAAGACUAAUCUUGUA | OOOOOOOOOOOOOOOOOO |
| | A | | |
| WV-42271 | mUmGfUmGfUmGfUfUfUmUfUmCfAmCfAmUfGmU | UGUGUGUUUUUCACAUGU | OOOOOOOOOOOOOOOOOO |
| | fA | A | |
| WV-42272 | mUmGfUmGfUmUfUfUfUmCfAmCfAmUfGmUfAmU | UGUGUUUUUCACAUGUAU | OOOOOOOOOOOOOOOOOO |
| | fA | A | |
| WV-42273 | mGmUfGmUfUmUfUfUfCmAfCmAfUmGfUmAfUmU | GUGUUUUUCACAUGUAUU | OOOOOOOOOOOOOOOOOO |
| | fA | A | |
| WV-42274 | mGmUfUmUfUmUfCfAfCmAfUmGfUmAfUmUfAmU | GUUUUUCACAUGUAUUAU | OOOOOOOOOOOOOOOOOO |
| | fA | A | |
| WV-42275 | mUmUfUmUfCmAfCfAfUmGfUmAfUmUfAmUfAmG | UUUUCACAUGUAUUAUAG | OOOOOOOOOOOOOOOOOO |
| | fA | A | |
| WV-42276 | mUmUfUmCfAmCfAfUfGmUfAmUfUmAfUmAfGmAf | UUUCACAUGUAUUAUAGA | OOOOOOOOOOOOOOOOOO |
| | A | A | |
| WV-42277 | mAmCfAmUfGmUfAfUfUmAfUmAfGmAfAmUfGmCf | ACAUGUAUUAUAGAAUGCA | OOOOOOOOOOOOOOOOOO |
| | A | | |
| WV-42278 | mAmUfGmUfAmUfUfAfUmAfGmAfAmUfGmCfUmU | AUGUAUUAUAGAAUGCUU | OOOOOOOOOOOOOOOOOO |
| | fA | A | |
| WV-42279 | mUmAfUmUfAmUfAfGfAmAfUmGfCmUfUmUfUmG | UAUUAUAGAAUGCUUUUG | OOOOOOOOOOOOOOOOOO |
| | fA | A | |
| WV-42280 | mUmAfUmAfGmAfAfUfGmCfUmUfUmUfGmCfAmU | UAUAGAAUGCUUUUGCAU | OOOOOOOOOOOOOOOOOO |
| | fA | A | |
| WV-42281 | mUmAfGmAfAmUfGfCfUmUfUmUfGmCfAmUfGmG | UAGAAUGCUUUUGCAUGG | OOOOOOOOOOOOOOOOOO |
| | fA | A | |
| WV-42282 | mAmGfAmAfUmGfCfUfUmUfUmGfCmAfUmGfGmAf | AGAAUGCUUUUGCAUGGA | OOOOOOOOOOOOOOOOOO |
| | A | A | |
| WV-42283 | mGmAfAmUfGmCfUfUfUmUfGmCfAmUfGmGfAmCf | GAAUGCUUUUGCAUGGAC | OOOOOOOOOOOOOOOOOO |
| | A | A | |
| WV-42284 | mAmAfUmGfCmUfUfUfUmGfCmAfUmGfGmAfCmUf | AAUGCUUUUGCAUGGACU | OOOOOOOOOOOOOOOOOO |
| | A | A | |
| WV-42285 | mAmUfGmCfUmUfUfUfGmCfAmUfGmGfAmCfUmAf | AUGCUUUUGCAUGGACUA | OOOOOOOOOOOOOOOOOO |
| | A | A | |
| WV-42286 | mGmCfUmUfUmUfGfCfAmUfGmGfAmCfUmAfUmCf | GCUUUUGCAUGGACUAUCA | OOOOOOOOOOOOOOOOOO |
| | A | | |
| WV-42287 | mCmUfUmUfUmGfCfAfUmGfGmAfCmUfAmUfCmCf | CUUUUGCAUGGACUAUCCA | OOOOOOOOOOOOOOOOOO |
| | A | | |
| WV-42288 | mUmUfUmUfGmCfAfUfGmGfAmCfUmAfUmCfCmUf | UUUUGCAUGGACUAUCCUA | OOOOOOOOOOOOOOOOOO |
| | A | | |
| WV-42289 | mUmUfGmCfAmUfGfGfAmCfUmAfUmCfCmUfCmUf | UUGCAUGGACUAUCCUCUA | OOOOOOOOOOOOOOOOOO |
| | A | | |
| WV-42290 | mUmGfCmAfUmGfGfAfCmUfAmUfCmCfUmCfUmUf | UGCAUGGACUAUCCUCUUA | OOOOOOOOOOOOOOOOOO |
| | A | | |
| WV-42291 | mGmCfAmUfGmGfAfCfUmAfUmCfCmUfCmUfUmGf | GCAUGGACUAUCCUCUUGA | OOOOOOOOOOOOOOOOOO |
| | A | | |
| WV-42292 | mCmAfUmGfGmAfCfUfAmUfCmCfUmCfUmUfGmUf | CAUGGACUAUCCUCUUGUA | OOOOOOOOOOOOOOOOOO |
| | A | | |
| WV-42293 | mAmUfGmGfAmCfUfAfUmCfCmUfCmUfUmGfUmUf | AUGGACUAUCCUCUUGUUA | OOOOOOOOOOOOOOOOOO |
| | A | | |
| WV-42294 | mUmGfGmAfCmUfAfUfCmCfUmCfUmUfGmUfUmUf | UGGACUAUCCUCUUGUUU | OOOOOOOOOOOOOOOOOO |
| | A | A | |
| WV-42295 | mGmAfCmUfAmUfCfCfUmCfUmUfGmUfUmUfUmUf | GACUAUCCUCUUGUUUUU | OOOOOOOOOOOOOOOOOO |
| | A | A | |
| WV-42296 | mUmAfUmCfCmUfCfUfUmGfUmUfUmUfUmAfUmU | UAUCCUCUUGUUUUUAUU | OOOOOOOOOOOOOOOOOO |
| | fA | A | |
| WV-42297 | mAmUfCmCfUmCfUfUfGmUfUmUfUmUfAmUfUmA | AUCCUCUUGUUUUUAUUA | OOOOOOOOOOOOOOOOOO |
| | fA | A | |
| WV-42298 | mUmCfCmUfCmUfUfGfUmUfUmUfUmAfUmUfAmA | UCCUCUUGUUUUUAUUAA | OOOOOOOOOOOOOOOOOO |
| | fA | A | |
| WV-42299 | mUmUfUmUfAmUfUfAfAmAfAmAfCmAfAmAfUmGf | UUUUAUUAAAAACAAAUGA | OOOOOOOOOOOOOOOOOO |
| | A | | |
| WV-42300 | mUmAfUmUfAmAfAfAfAmCfAmAfAmUfGmAfUmUf | UAUUAAAAACAAAUGAUUA | OOOOOOOOOOOOOOOOOO |
| | A | | |
| WV-42301 | mAmUfUmAfAmAfAfAfCmAfAmAfUmGfAmUfUmUf | AUUAAAAACAAAUGAUUUA | OOOOOOOOOOOOOOOOOO |
| | A | | |
| WV-42302 | mAmAfAmAfUmAfAfCfCmUfCmUfUmGfUmAfGmUf | AAAAUAACCUCUUGUAGUA | OOOOOOOOOOOOOOOOOO |
| | A | | |
| WV-42303 | mAmAfAmUfAmAfCfCfUmCfUmUfGmUfAmGfUmUf | AAAUAACCUCUUGUAGUUA | OOOOOOOOOOOOOOOOOO |
| | A | | |
| WV-42304 | mAmAfUmAfAmCfCfUfCmUfUmGfUmAfGmUfUmAf | AAUAACCUCUUGUAGUUAA | OOOOOOOOOOOOOOOOOO |
| | A | | |
| WV-42305 | mAmUfAmAfCmCfUfCfUmUfGmUfAmGfUmUfAmUf | AUAACCUCUUGUAGUUAUA | OOOOOOOOOOOOOOOOOO |
| | A | | |
| WV-42306 | mUmAfAmCfCmUfCfUfUmGfUmAfGmUfUmAfUmAf | UAACCUCUUGUAGUUAUAA | OOOOOOOOOOOOOOOOOO |
| | A | | |
| WV-42307 | mAmAfCmCfUmCfUfUfGmUfAmGfUmUfAmUfAmAf | AACCUCUUGUAGUUAUAAA | OOOOOOOOOOOOOOOOOO |
| | A | | |
| WV-42308 | mAmGfUmUfAmUfAfAfAmAfUmAfAmAfAmCfGmUf | AGUUAUAAAAUAAAACGUA | OOOOOOOOOOOOOOOOOO |
| | A | | |
| WV-42354 | mU*fG*mAmUmGfUmUmCmAmUmGmGmCfUmUf | UGAUGUUCAUGGCUUUGC | XXOOOOOOOOOOOOOOOOOO |
| | UmGmCmUmCmU*mU*mU | UCUUU | XX |
| WV-42355 | mU*fA*mGmGmAfUmGmAmUmGmUmUmCfAmUf | UAGGAUGAUGUUCAUGGC | XXOOOOOOOOOOOOOOOOOO |
| | GmGmCmUmUmU*mU*mU | UUUUU | XX |
| WV-42356 | mU*fU*mUmUmCfUmAmGmGmAmUmGmAfUmGf | UUUUCUAGGAUGAUGUUC | XXOOOOOOOOOOOOOOOOOO |
| | UmUmCmAmUmG*mU*mU | AUGUU | XX |
| WV-42357 | mU*fA*mGmGmAfUmUmUmCmUmAmGmGfAmUf | UAGGAUUUCUAGGAUGAU | XXOOOOOOOOOOOOOOOOOO |
| | GmAmUmGmUmU*mU*mU | GUUUU | XX |
| WV-42358 | mU*fA*mGmCmAfGmAmAmGmGmAmUmUfUmCf | UAGCAGAAGGAUUUCUAG | XXOOOOOOOOOOOOOOOOOO |
| | UmAmGmGmAmU*mU*mU | GAUUU | XX |
| WV-42359 | mU*fG*mAmAmGfCmAmGmAmAmGmGmAfUmUf | UGAAGCAGAAGGAUUUCU | XXOOOOOOOOOOOOOOOOOO |
| | UmCmUmAmGmG*mU*mU | AGGUU | XX |
| WV-42360 | mU*fA*mUmGmAfUmGmGmUmGmAmUmCfAmGf | UAUGAUGGUGAUCAGAAG | XXOOOOOOOOOOOOOOOOOO |
| | AmAmGmCmAmG*mU*mU | CAGUU | XX |
| WV-42361 | mU*fA*mGmAmUfGmAmUmGmGmUmGmAfUmCf | UAGAUGAUGGUGAUCAGA | XXOOOOOOOOOOOOOOOOOO |
| | AmGmAmAmGmC*mU*mU | AGCUU | XX |
| WV-42362 | mU*fG*mUmAmAfUmGmAmGmAmAmCmAfAmUf | UGUAAUGAGAACAAUCUCC | XXOOOOOOOOOOOOOOOOOO |
| | CmUmCmCmCmC*mU*mU | CCUU | XX |
| WV-42363 | mU*fA*mGmUmAfAmUmGmAmGmAmAmCfAmAf | UAGUAAUGAGAACAAUCUC | XXOOOOOOOOOOOOOOOOOO |
| | UmCmUmCmCmC*mU*mU | CCUU | XX |
| WV-42364 | mU*fG*mUmUmAfCmAmUmCmAmCmCmCfAmCfU | UGUUACAUCACCCACUUCU | XXOOOOOOOOOOOOOOOOOO |
| | mUmCmUmUmU*mU*mU | UUUU | XX |
| WV-42365 | mU*fC*mAmCmCfAmCmGmAmUmUmGmUfUmAf | UCACCACGAUUGUUACAUC | XXOOOOOOOOOOOOOOOOOO |
| | CmAmUmCmAmC*mU*mU | ACUU | XX |
| WV-42366 | mU*fU*mAmUmUfCmAmCmCmAmCmGmAfUmUf | UUAUUCACCACGAUUGUUA | XXOOOOOOOOOOOOOOOOOO |
| | GmUmUmAmCmA*mU*mU | CAUU | XX |
| WV-42367 | mU*fA*mGmAmUfCmGmGmCmUmGmGmAfUmAf | UAGAUCGGCUGGAUAUAC | XXOOOOOOOOOOOOOOOOOO |
| | UmAmCmUmGmU*mU*mU | UGUUU | XX |
| WV-42368 | mU*fU*mCmUmCfUmUmCmAmUmCmCmUfUmGf | UUCUCUUCAUCCUUGGUGC | XXOOOOOOOOOOOOOOOOOO |
| | GmUmGmCmUmG*mU*mU | UGUU | XX |
| WV-42369 | mU*fA*mUmCmUfCmUmUmCmAmUmCmCfUmUf | UAUCUCUUCAUCCUUGGU | XXOOOOOOOOOOOOOOOOOO |
| | GmGmUmGmCmU*mU*mU | GCUUU | XX |
| WV-42370 | mU*fG*mGmUmAfAmUmCmUmCmUmUmCfAmUf | UGGUAAUCUCUUCAUCCUU | XXOOOOOOOOOOOOOOOOOO |
| | CmCmUmUmGmG*mU*mU | GGUU | XX |
| WV-42371 | mU*fG*mGmAmUfGmUmUmGmAmCmCmUfCmAf | UGGAUGUUGACCUCAAAU | XXOOOOOOOOOOOOOOOOOO |
| | AmAmUmGmUmC*mU*mU | GUCUU | XX |
| WV-42372 | mU*fG*mAmUmCfCmAmAmAmAmAmUmGfUmCf | UGAUCCAAAAAUGUCCUAG | XXOOOOOOOOOOOOOOOOOO |
| | CmUmAmGmGmA*mU*mU | GAUU | XX |
| WV-42373 | mU*fG*mUmGmAfUmCmCmAmAmAmAmAfUmGf | UGUGAUCCAAAAAUGUCCU | XXOOOOOOOOOOOOOOOOOO |
| | UmCmCmUmAmG*mU*mU | AGUU | XX |
| WV-42374 | mU*fG*mAmAmGfUmGmCmUmUmUmUmGfUmGf | UGAAGUGCUUUUGUGAUC | XXOOOOOOOOOOOOOOOOOO |
| | AmUmCmCmAmA*mU*mU | CAAUU | XX |
| WV-42375 | mU*fU*mGmGmAfAmGmAmAmGmUmGmCfUmUf | UUGGAAGAAGUGCUUUUG | XXOOOOOOOOOOOOOOOOOO |
| | UmUmGmUmGmA*mU*mU | UGAUU | XX |
| WV-42376 | mU*fU*mUmGmCfUmGmGmAmAmCmAmAfUmAf | UUUGCUGGAACAAUAUGG | XXOOOOOOOOOOOOOOOOOO |
| | UmGmGmGmAmU*mU*mU | GAUUU | XX |
| WV-42377 | mU*fC*mUmGmUfGmAmAmAmGmCmCmAfAmCfA | UCUGUGAAAGCCAACAGCG | XXOOOOOOOOOOOOOOOOOO |
| | mGmCmGmGmC*mU*mU | GCUU | XX |
| WV-42378 | mU*fC*mAmGmAfCmCmUmCmUmGmUmGfAmAf | UCAGACCUCUGUGAAAGCC | XXOOOOOOOOOOOOOOOOOO |
| | AmGmCmCmAmA*mU*mU | AAUU | XX |
| WV-42379 | mU*fG*mUmCmAfGmAmCmCmUmCmUmGfUmGf | UGUCAGACCUCUGUGAAAG | XXOOOOOOOOOOOOOOOOOO |
| | AmAmAmGmCmC*mU*mU | CCUU | XX |
| WV-42380 | mU*fG*mAmAmGfUmUmCmUmGmAmUmGfUmCf | UGAAGUUCUGAUGUCAGA | XXOOOOOOOOOOOOOOOOOO |
| | AmGmAmCmCmU*mU*mU | CCUUU | XX |
| WV-42381 | mU*fU*mUmGmAfUmAmCmCmAmGmUmUfUmUf | UUUGAUACCAGUUUUUCCC | XXOOOOOOOOOOOOOOOOOO |
| | UmCmCmCmAmA*mU*mU | AAUU | XX |
| WV-42382 | mU*fU*mUmUmGfAmUmAmCmCmAmGmUfUmUf | UUUUGAUACCAGUUUUUC | XXOOOOOOOOOOOOOOOOOO |
| | UmUmCmCmCmA*mU*mU | CCAUU | XX |
| WV-42383 | mU*fG*mAmCmAfUmGmAmGmGmUmUmUfUmGf | UGACAUGAGGUUUUGAUA | XXOOOOOOOOOOOOOOOOOO |
| | AmUmAmCmCmA*mU*mU | CCAUU | XX |
| WV-42384 | mU*fA*mCmAmGfGmCmCmAmUmAmAmUfCmUf | UACAGGCCAUAAUCUUGUG | XXOOOOOOOOOOOOOOOOOO |
| | UmGmUmGmCmU*mU*mU | CUUU | XX |
| WV-42385 | mU*fU*mAmCmAfGmGmCmCmAmUmAmAfUmCf | UUACAGGCCAUAAUCUUGU | XXOOOOOOOOOOOOOOOOOO |
| | UmUmGmUmGmC*mU*mU | GCUU | XX |
| WV-42386 | mU*fC*mCmAmAfUmAmCmAmGmGmCmCfAmUfA | UCCAAUACAGGCCAUAAUC | XXOOOOOOOOOOOOOOOOOO |
| | mAmUmCmUmU*mU*mU | UUUU | XX |
| WV-42387 | mU*fC*mUmUmCfUmUmAmCmGmAmCmUfUmCf | UCUUCUUACGACUUCAUCU | XXOOOOOOOOOOOOOOOOOO |
| | AmUmCmUmGmU*mU*mU | GUUU | XX |
| WV-42388 | mU*fU*mCmCmAfUmCmUmAmUmCmAmGfAmCf | UUCCAUCUAUCAGACUUCU | XXOOOOOOOOOOOOOOOOOO |
| | UmUmCmUmUmA*mU*mU | UAUU | XX |
| WV-42389 | mU*fA*mGmUmAfUmUmCmCmAmUmCmUfAmUf | UAGUAUUCCAUCUAUCAGA | XXOOOOOOOOOOOOOOOOOO |
| | CmAmGmAmCmU*mU*mU | CUUU | XX |
| WV-42390 | mU*fA*mAmGmUfAmUmUmCmCmAmUmCfUmAf | UAAGUAUUCCAUCUAUCAG | XXOOOOOOOOOOOOOOOOOO |
| | UmCmAmGmAmC*mU*mU | ACUU | XX |
| WV-42391 | mU*fA*mUmUmGfGmUmAmAmGmUmAmUfUmCf | UAUUGGUAAGUAUUCCAU | XXOOOOOOOOOOOOOOOOOO |
| | CmAmUmCmUmA*mU*mU | CUAUU | XX |
| WV-42392 | mU*fU*mAmUmUfGmGmUmAmAmGmUmAfUmUf | UUAUUGGUAAGUAUUCCA | XXOOOOOOOOOOOOOOOOOO |
| | CmCmAmUmCmU*mU*mU | UCUUU | XX |
| WV-42393 | mU*fC*mUmUmAfUmUmGmGmUmAmAmGfUmAf | UCUUAUUGGUAAGUAUUC | XXOOOOOOOOOOOOOOOOOO |
| | UmUmCmCmAmU*mU*mU | CAUUU | XX |
| WV-42394 | mU*fU*mCmUmUfAmUmUmGmGmUmAmAfGmUf | UUCUUAUUGGUAAGUAUU | XXOOOOOOOOOOOOOOOOOO |
| | AmUmUmCmCmA*mU*mU | CCAUU | XX |
| WV-42395 | mU*fA*mAmAmAfUmCmAmUmUmUmUmCfUmUf | UAAAAUCAUUUUCUUAUU | XXOOOOOOOOOOOOOOOOOO |
| | AmUmUmGmGmU*mU*mU | GGUUU | XX |
| WV-42396 | mU*fA*mGmAmGfUmUmGmCmAmCmCmGfUmUf | UAGAGUUGCACCGUUUUG | XXOOOOOOOOOOOOOOOOOO |
| | UmUmGmGmGmC*mU*mU | GGCUU | XX |
| WV-42397 | mU*fA*mGmUmCfCmAmGmAmAmUmAmGfAmGf | UAGUCCAGAAUAGAGUUGC | XXOOOOOOOOOOOOOOOOOO |
| | UmUmGmCmAmC*mU*mU | ACUU | XX |
| WV-42398 | Mod001L001mA*mGmAmGmCmAfAmAfGfCfCmA | AGAGCAAAGCCAUGAACAU | OXOOOOOOOOOOOOOOOOOO |
| | mUmGmAmAmCmAmUmC*mA | CA | X |
| WV-42399 | Mod001L001mA*mAmAmGmCmCfAmUfGfAfAmC | AAAGCCAUGAACAUCAUCC | OXOOOOOOOOOOOOOOOOOO |
| | mAmUmCmAmUmCmCmU*mA | UA | X |
| WV-42400 | Mod001L001mC*mAmUmGmAmAfCmAfUfCfAmU | CAUGAACAUCAUCCUAGAA | OXOOOOOOOOOOOOOOOOOO |
| | mCmCmUmAmGmAmAmA*mA | AA | X |
| WV-42401 | Mod001L001mA*mAmCmAmUmCfAmUfCfCfUmA | AACAUCAUCCUAGAAAUCC | OXOOOOOOOOOOOOOOOOOO |
| | mGmAmAmAmUmCmCmU*mA | UA | X |
| WV-42402 | Mod001L001mA*mUmCmCmUmAfGmAfAfAfUmC | AUCCUAGAAAUCCUUCUGC | OXOOOOOOOOOOOOOOOOOO |
| | mCmUmUmCmUmGmCmU*mA | UA | X |
| WV-42403 | Mod001L001mC*mCmUmAmGmAfAmAfUfCfCmU | CCUAGAAAUCCUUCUGCUU | OXOOOOOOOOOOOOOOOOOO |
| | mUmCmUmGmCmUmUmC*mA | CA | X |
| WV-42404 | Mod001L001mC*mUmGmCmUmUfCmUfGfAfUmC | CUGCUUCUGAUCACCAUCA | OXOOOOOOOOOOOOOOOOOO |
| | mAmCmCmAmUmCmAmU*mA | UA | X |
| WV-42405 | Mod001L001mG*mCmUmUmCmUfGmAfUfCfAmC | GCUUCUGAUCACCAUCAUC | OXOOOOOOOOOOOOOOOOOO |
| | mCmAmUmCmAmUmCmU*mA | UA | X |
| WV-42406 | Mod001L001mG*mGmGmGmAmGfAmUfUfGfUmU | GGGGAGAUUGUUCUCAUU | OXOOOOOOOOOOOOOOOOOO |
| | mCmUmCmAmUmUmAmC*mA | ACA | X |
| WV-42407 | Mod001L001mG*mGmGmAmGmAfUmUfGfUfUmC | GGGAGAUUGUUCUCAUUA | OXOOOOOOOOOOOOOOOOOO |
| | mUmCmAmUmUmAmCmU*mA | CUA | X |
| WV-42408 | Mod001L001mA*mAmAmGmAmAfGmUfGfGfGmU | AAAGAAGUGGGUGAUGUA | OXOOOOOOOOOOOOOOOOOO |
| | mGmAmUmGmUmAmAmC*mA | ACA | X |
| WV-42409 | Mod001L001mG*mUmGmAmUmGfUmAfAfCfAmA | GUGAUGUAACAAUCGUGG | OXOOOOOOOOOOOOOOOOOO |
| | mUmCmGmUmGmGmUmG*mA | UGA | X |
| WV-42410 | Mod001L001mU*mGmUmAmAmCfAmAfUfCfGmU | UGUAACAAUCGUGGUGAA | OXOOOOOOOOOOOOOOOOOO |
| | mGmGmUmGmAmAmUmA*mA | UAA | X |
| WV-42411 | Mod001L001mA*mCmAmGmUmAfUmAfUfCfCmA | ACAGUAUAUCCAGCCGAUC | OXOOOOOOOOOOOOOOOOOO |
| | mGmCmCmGmAmUmCmU*mA | UA | X |
| WV-42412 | Mod001L001mC*mAmGmCmAmCfCmAfAfGfGmAm | CAGCACCAAGGAUGAAGAG | OXOOOOOOOOOOOOOOOOOO |
| | UmGmAmAmGmAmGmA*mA | AA | X |
| WV-42413 | Mod001L001mA*mGmCmAmCmCfAmAfGfGfAmU | AGCACCAAGGAUGAAGAGA | OXOOOOOOOOOOOOOOOOOO |
| | mGmAmAmGmAmGmAmU*mA | UA | X |
| WV-42414 | Mod001L001mC*mCmAmAmGmGfAmUfGfAfAmG | CCAAGGAUGAAGAGAUUAC | OXOOOOOOOOOOOOOOOOOO |
| | mAmGmAmUmUmAmCmC*mA | CA | X |
| WV-42415 | Mod001L001mG*mAmCmAmUmUfUmGfAfGfGmU | GACAUUUGAGGUCAACAUC | OXOOOOOOOOOOOOOOOOOO |
| | mCmAmAmCmAmUmCmC*mA | CA | X |
| WV-42416 | Mod001L001mU*mCmCmUmAmGfGmAfCfAfUmU | UCCUAGGACAUUUUUGGA | OXOOOOOOOOOOOOOOOOOO |
| | mUmUmUmGmGmAmUmC*mA | UCA | X |
| WV-42417 | Mod001L001mC*mUmAmGmGmAfCmAfUfUfUmU | CUAGGACAUUUUUGGAUC | OXOOOOOOOOOOOOOOOOOO |
| | mUmGmGmAmUmCmAmC*mA | ACA | X |
| WV-42418 | Mod001L001mU*mUmGmGmAmUfCmAfCfAfAmA | UUGGAUCACAAAAGCACUU | OXOOOOOOOOOOOOOOOOOO |
| | mAmGmCmAmCmUmUmC*mA | CA | X |
| WV-42419 | Mod001L001mU*mCmAmCmAmAfAmAfGfCfAmCm | UCACAAAAGCACUUCUUCC | OXOOOOOOOOOOOOOOOOOO |
| | UmUmCmUmUmCmCmA*mA | AA | X |
| WV-42420 | Mod001L001mA+mUmCmCmCmAfUmAfUfUfGmU | AUCCCAUAUUGUUCCAGCA | OXOOOOOOOOOOOOOOOOOO |
| | mUmCmCmAmGmCmAmA*mA | AA | X |
| WV-42421 | Mod001L001mG*mCmCmGmCmUfGmUfUfGfGmC | GCCGCUGUUGGCUUUCACA | OXOOOOOOOOOOOOOOOOOO |
| | mUmUmUmCmAmCmAmG*mA | GA | X |
| WV-42422 | Mod001L001mU*mUmGmGmCmUfUmUfCfAfCmA | UUGGCUUUCACAGAGGUC | OXOOOOOOOOOOOOOOOOOO |
| | mGmAmGmGmUmCmUmG*mA | UGA | X |
| WV-42423 | Mod001L001mG*mGmCmUmUmUfCmAfCfAfGmA | GGCUUUCACAGAGGUCUGA | OXOOOOOOOOOOOOOOOOOO |
| | mGmGmUmCmUmGmAmC*mA | CA | X |
| WV-42424 | Mod001L001mA*mGmGmUmCmUfGmAfCfAfUmC | AGGUCUGACAUCAGAACUU | OXOOOOOOOOOOOOOOOOOO |
| | mAmGmAmAmCmUmUmC*mA | CA | X |
| WV-42425 | Mod001L001mU*mUmGmGmGmAfAmAfAfAfCmU | UUGGGAAAAACUGGUAUC | OXOOOOOOOOOOOOOOOOOO |
| | mGmGmUmAmUmCmAmA*mA | AAA | X |
| WV-42426 | Mod001L001mU*mGmGmGmAmAfAmAfAfCfUmG | UGGGAAAAACUGGUAUCAA | OXOOOOOOOOOOOOOOOOOO |
| | mGmUmAmUmCmAmAmA*mA | AA | X |
| WV-42427 | Mod001L001mU*mGmGmUmAmUfCmAfAfAfAmC | UGGUAUCAAAACCUCAUGU | OXOOOOOOOOOOOOOOOOOO |
| | mCmUmCmAmUmGmUmC*mA | CA | X |
| WV-42428 | Mod001L001mA*mGmCmAmCmAfAmGfAfUfUmA | AGCACAAGAUUAUGGCCUG | OXOOOOOOOOOOOOOOOOOO |
| | mUmGmGmCmCmUmGmU*mA | UA | X |
| WV-42429 | Mod001L001mG*mCmAmCmAmAfGmAfUfUfAmU | GCACAAGAUUAUGGCCUGU | OXOOOOOOOOOOOOOOOOOO |
| | mGmGmCmCmUmGmUmA*mA | AA | X |
| WV-42430 | Mod001L001mA*mAmGmAmUmUfAmUfGfGfCmC | AAGAUUAUGGCCUGUAUU | OXOOOOOOOOOOOOOOOOOO |
| | mUmGmUmAmUmUmGmG*mA | GGA | X |
| WV-42431 | Mod001L001mA*mCmAmGmAmUfGmAfAfGfUmC | ACAGAUGAAGUCGUAAGAA | OXOOOOOOOOOOOOOOOOOO |
| | mGmUmAmAmGmAmAmG*mA | GA | X |
| WV-42432 | Mod001L001mU*mAmAmGmAmAfGmUfCfUfGmA | UAAGAAGUCUGAUAGAUG | OXOOOOOOOOOOOOOOOOOO |
| | mUmAmGmAmUmGmGmA*mA | GAA | X |
| WV-42433 | Mod001L001mA*mGmUmCmUmGfAmUfAfGfAmU | AGUCUGAUAGAUGGAAUA | OXOOOOOOOOOOOOOOOOOO |
| | mGmGmAmAmUmAmCmU*mA | CUA | X |
| WV-42434 | Mod001L001mG*mUmCmUmGmAfUmAfGfAfUmG | GUCUGAUAGAUGGAAUAC | OXOOOOOOOOOOOOOOOOOO |
| | mGmAmAmUmAmCmUmU*mA | UUA | X |
| WV-42435 | Mod001L001mU*mAmGmAmUmGfGmAfAfUfAmC | UAGAUGGAAUACUUACCAA | OXOOOOOOOOOOOOOOOOOO |
| | mUmUmAmCmCmAmAmU*mA | UA | X |
| WV-42436 | Mod001L001mA*mGmAmUmGmGfAmAfUfAfCmU | AGAUGGAAUACUUACCAAU | OXOOOOOOOOOOOOOOOOOO |
| | mUmAmCmCmAmAmUmA*mA | AA | X |
| WV-42437 | Mod001L001mA*mUmGmGmAmAfUmAfCfUfUmA | AUGGAAUACUUACCAAUAA | OXOOOOOOOOOOOOOOOOOO |
| | mCmCmAmAmUmAmAmG*mA | GA | X |
| WV-42438 | Mod001L001mU*mGmGmAmAmUfAmCfUfUfAmC | UGGAAUACUUACCAAUAAG | OXOOOOOOOOOOOOOOOOOO |
| | mCmAmAmUmAmAmGmA*mA | AA | X |
| WV-42439 | Mod001L001mA*mCmCmAmAmUfAmAfGfAfAmA | ACCAAUAAGAAAAUGAUUU | OXOOOOOOOOOOOOOOOOOO |
| | mAmUmGmAmUmUmUmU*mA | UA | X |
| WV-42440 | Mod001L001mG*mCmCmCmAmAfAmAfCfGfGmU | GCCCAAAACGGUGCAACUC | OXOOOOOOOOOOOOOOOOOO |
| | mGmCmAmAmCmUmCmU*mA | UA | X |
| WV-42441 | Mod001L001mG*mUmGmCmAmAfCmUfCfUfAmU | GUGCAACUCUAUUCUGGAC | OXOOOOOOOOOOOOOOOOOO |
| | mUmCmUmGmGmAmCmU*mA | UA | X |
| WV-42442 | L001mA*mGmAmGmCmAfAmAfGfCfCmAmUmGm | AGAGCAAAGCCAUGAACAU | OXOOOOOOOOOOOOOOOOOO |
| | AmAmCmAmUmC*mA | CA | X |
| WV-42443 | L001mA*mAmAmGmCmCfAmUfGfAfAmCmAmUmC | AAAGCCAUGAACAUCAUCC | OXOOOOOOOOOOOOOOOOOO |
| | mAmUmCmCmU*mA | UA | X |
| WV-42444 | L001mC*mAmUmGmAmAfCmAfUfCfAmUmCmCmU | CAUGAACAUCAUCCUAGAA | OXOOOOOOOOOOOOOOOOOO |
| | mAmGmAmAmA*mA | AA | X |
| WV-42445 | L001mA*mAmCmAmUmCfAmUfCfCfUmAmGmAmA | AACAUCAUCCUAGAAAUCC | OXOOOOOOOOOOOOOOOOOO |
| | mAmUmCmCmU*mA | UA | X |
| WV-42446 | L001mA*mUmCmCmUmAfGmAfAfAfUmCmCmUm | AUCCUAGAAAUCCUUCUGC | OXOOOOOOOOOOOOOOOOOO |
| | UmCmUmGmCmU*mA | UA | X |
| WV-42447 | L001mC*mCmUmAmGmAfAmAfUfCfCmUmUmCm | CCUAGAAAUCCUUCUGCUU | OXOOOOOOOOOOOOOOOOOO |
| | UmGmCmUmUmC*mA | CA | X |
| WV-42448 | L001mC*mUmGmCmUmUfCmUfGfAfUmCmAmCm | CUGCUUCUGAUCACCAUCA | OXOOOOOOOOOOOOOOOOOO |
| | CmAmUmCmAmU*mA | UA | X |
| WV-42449 | L001mG*mCmUmUmCmUfGmAfUfCfAmCmCmAm | GCUUCUGAUCACCAUCAUC | OXOOOOOOOOOOOOOOOOOO |
| | UmCmAmUmCmU*mA | UA | X |
| WV-42450 | L001mG*mGmGmGmAmGfAmUfUfGfUmUmCmUm | GGGGAGAUUGUUCUCAUU | OXOOOOOOOOOOOOOOOOOO |
| | CmAmUmUmAmC*mA | ACA | X |
| WV-42451 | L001mG*mGmGmAmGmAfUmUfGfUfUmCmUmCm | GGGAGAUUGUUCUCAUUA | OXOOOOOOOOOOOOOOOOOO |
| | AmUmUmAmCmU*mA | CUA | X |
| WV-42452 | L001mA*mAmAmGmAmAfGmUfGfGfGmUmGmAm | AAAGAAGUGGGUGAUGUA | OXOOOOOOOOOOOOOOOOOO |
| | UmGmUmAmAmC*mA | ACA | X |
| WV-42453 | L001mG*mUmGmAmUmGfUmAfAfCfAmAmUmCm | GUGAUGUAACAAUCGUGG | OXOOOOOOOOOOOOOOOOOO |
| | GmUmGmGmUmG*mA | UGA | X |
| WV-42454 | L001mU*mGmUmAmAmCfAmAfUfCfGmUmGmGm | UGUAACAAUCGUGGUGAA | OXOOOOOOOOOOOOOOOOOO |
| | UmGmAmAmUmA*mA | UAA | X |
| WV-42455 | L001mA*mCmAmGmUmAfUmAfUfCfCmAmGmCmC | ACAGUAUAUCCAGCCGAUC | OXOOOOOOOOOOOOOOOOOO |
| | mGmAmUmCmU*mA | UA | X |
| WV-42456 | L001mC*mAmGmCmAmCfCmAfAfGfGmAmUmGmA | CAGCACCAAGGAUGAAGAG | OXOOOOOOOOOOOOOOOOOO |
| | mAmGmAmGmA*mA | AA | X |
| WV-42457 | L001mA*mGmCmAmCmCfAmAfGfGfAmUmGmAm | AGCACCAAGGAUGAAGAGA | OXOOOOOOOOOOOOOOOOOO |
| | AmGmAmGmAmU*mA | UA | X |
| WV-42458 | L001mC*mCmAmAmGmGfAmUfGfAfAmGmAmGm | CCAAGGAUGAAGAGAUUAC | OXOOOOOOOOOOOOOOOOOO |
| | AmUmUmAmCmC*mA | CA | X |
| WV-42459 | L001mG*mAmCmAmUmUfUmGfAfGfGmUmCmAm | GACAUUUGAGGUCAACAUC | OXOOOOOOOOOOOOOOOOOO |
| | AmCmAmUmCmC*mA | CA | X |
| WV-42460 | L001mU*mCmCmUmAmGfGmAfCfAfUmUmUmUm | UCCUAGGACAUUUUUGGA | OXOOOOOOOOOOOOOOOOOO |
| | UmGmGmAmUmC*mA | UCA | X |
| WV-42461 | L001mC*mUmAmGmGmAfCmAfUfUfUmUmUmGm | CUAGGACAUUUUUGGAUC | OXOOOOOOOOOOOOOOOOOO |
| | GmAmUmCmAmC*mA | ACA | X |
| WV-42462 | L001mU*mUmGmGmAmUfCmAfCfAfAmAmAmGm | UUGGAUCACAAAAGCACUU | OXOOOOOOOOOOOOOOOOOO |
| | CmAmCmUmUmC*mA | CA | X |
| WV-42463 | L001mU*mCmAmCmAmAfAmAfGfCfAmCmUmUmC | UCACAAAAGCACUUCUUCC | OXOOOOOOOOOOOOOOOOOO |
| | mUmUmCmCmA*mA | AA | X |
| WV-42464 | L001mA*mUmCmCmCmAfUmAfUfUfGmUmUmCm | AUCCCAUAUUGUUCCAGCA | OXOOOOOOOOOOOOOOOOOO |
| | CmAmGmCmAmA*mA | AA | X |
| WV-42465 | L001mG*mCmCmGmCmUfGmUfUfGfGmCmUmUm | GCCGCUGUUGGCUUUCACA | OXOOOOOOOOOOOOOOOOOO |
| | UmCmAmCmAmG*mA | GA | X |
| WV-42466 | L001mU*mUmGmGmCmUfUmUfCfAfCmAmGmAm | UUGGCUUUCACAGAGGUC | OXOOOOOOOOOOOOOOOOOO |
| | GmGmUmCmUmG*mA | UGA | X |
| WV-42467 | L001mG*mGmCmUmUmUfCmAfCfAfGmAmGmGm | GGCUUUCACAGAGGUCUGA | OXOOOOOOOOOOOOOOOOOO |
| | UmCmUmGmAmC*mA | CA | X |
| WV-42468 | L001mA*mGmGmUmCmUfGmAfCfAfUmCmAmGm | AGGUCUGACAUCAGAACUU | OXOOOOOOOOOOOOOOOOOO |
| | AmAmCmUmUmC*mA | CA | X |
| WV-42469 | L001mU*mUmGmGmGmAfAmAfAfAfCmUmGmGm | UUGGGAAAAACUGGUAUC | OXOOOOOOOOOOOOOOOOOO |
| | UmAmUmCmAmA*mA | AAA | X |
| WV-42470 | L001mU*mGmGmGmAmAfAmAfAfCfUmGmGmUm | UGGGAAAAACUGGUAUCAA | OXOOOOOOOOOOOOOOOOOO |
| | AmUmCmAmAmA*mA | AA | X |
| WV-42471 | L001mU*mGmGmUmAmUfCmAfAfAfAmCmCmUm | UGGUAUCAAAACCUCAUGU | OXOOOOOOOOOOOOOOOOOO |
| | CmAmUmGmUmC*mA | CA | X |
| WV-42472 | L001mA*mGmCmAmCmAfAmGfAfUfUmAmUmGm | AGCACAAGAUUAUGGCCUG | OXOOOOOOOOOOOOOOOOOO |
| | GmCmCmUmGmU*mA | UA | X |
| WV-42473 | L001mG*mCmAmCmAmAfGmAfUfUfAmUmGmGm | GCACAAGAUUAUGGCCUGU | OXOOOOOOOOOOOOOOOOOO |
| | CmCmUmGmUmA*mA | AA | X |
| WV-42474 | L001mA*mAmGmAmUmUfAmUfGfGfCmCmUmGm | AAGAUUAUGGCCUGUAUU | OXOOOOOOOOOOOOOOOOOO |
| | UmAmUmUmGmG*mA | GGA | X |
| WV-42475 | L001mA*mCmAmGmAmUfGmAfAfGfUmCmGmUm | ACAGAUGAAGUCGUAAGAA | OXOOOOOOOOOOOOOOOOOO |
| | AmAmGmAmAmG*mA | GA | X |
| WV-42476 | L001mU*mAmAmGmAmAfGmUfCfUfGmAmUmAm | UAAGAAGUCUGAUAGAUG | OXOOOOOOOOOOOOOOOOOO |
| | GmAmUmGmGmA*mA | GAA | X |
| WV-42477 | L001mA*mGmUmCmUmGfAmUfAfGfAmUmGmGm | AGUCUGAUAGAUGGAAUA | OXOOOOOOOOOOOOOOOOOO |
| | AmAmUmAmCmU*mA | CUA | X |
| WV-42478 | L001mG*mUmCmUmGmAfUmAfGfAfUmGmGmAm | GUCUGAUAGAUGGAAUAC | OXOOOOOOOOOOOOOOOOOO |
| | AmUmAmCmUmU*mA | UUA | X |
| WV-42479 | L001mU*mAmGmAmUmGfGmAfAfUfAmCmUmUm | UAGAUGGAAUACUUACCAA | OXOOOOOOOOOOOOOOOOOO |
| | AmCmCmAmAmU*mA | UA | X |
| WV-42480 | L001mA*mGmAmUmGmGfAmAfUfAfCmUmUmAm | AGAUGGAAUACUUACCAAU | OXOOOOOOOOOOOOOOOOOO |
| | CmCmAmAmUmA*mA | AA | X |
| WV-42481 | L001mA*mUmGmGmAmAfUmAfCfUfUmAmCmCm | AUGGAAUACUUACCAAUAA | OXOOOOOOOOOOOOOOOOOO |
| | AmAmUmAmAmG*mA | GA | X |
| WV-42482 | L001mU*mGmGmAmAmUfAmCfUfUfAmCmCmAm | UGGAAUACUUACCAAUAAG | OXOOOOOOOOOOOOOOOOOO |
| | AmUmAmAmGmA*mA | AA | X |
| WV-42483 | L001mA*mCmCmAmAmUfAmAfGfAfAmAmAmUm | ACCAAUAAGAAAAUGAUUU | OXOOOOOOOOOOOOOOOOOO |
| | GmAmUmUmUmU*mA | UA | X |
| WV-42484 | L001mG*mCmCmCmAmAfAmAfCfGfGmUmGmCmA | GCCCAAAACGGUGCAACUC | OXOOOOOOOOOOOOOOOOOO |
| | mAmCmUmCmU*mA | UA | X |
| WV-42485 | L001mG*mUmGmCmAmAfCmUfCfUfAmUmUmCm | GUGCAACUCUAUUCUGGAC | OXOOOOOOOOOOOOOOOOOO |
| | UmGmGmAmCmU*mA | UA | X |
| WV-42531 | L025L025mA*mGmAmGmCmAfAmAfGfCfCmAmUm | AGAGCAAAGCCAUGAACAU | OOXOOOOOOOOOOOOOOOOO |
| | GmAmAmCmAmUmC*mA | CA | OX |
| WV-42532 | L025L025mA*mAmAmGmCmCfAmUfGfAfAmCmAm | AAAGCCAUGAACAUCAUCC | OOXOOOOOOOOOOOOOOOOO |
| | UmCmAmUmCmCmU*mA | UA | OX |
| WV-42533 | L025L025mC*mAmUmGmAmAfCmAfUfCfAmUmCm | CAUGAACAUCAUCCUAGAA | OOXOOOOOOOOOOOOOOOOO |
| | CmUmAmGmAmAmA*mA | AA | OX |
| WV-42534 | L025L025mA*mAmCmAmUmCfAmUfCfCfUmAmGm | AACAUCAUCCUAGAAAUCC | OOXOOOOOOOOOOOOOOOOO |
| | AmAmAmUmCmCmU*mA | UA | OX |
| WV-42535 | L025L025mA*mUmCmCmUmAfGmAfAfAfUmCmCm | AUCCUAGAAAUCCUUCUGC | OOXOOOOOOOOOOOOOOOOO |
| | UmUmCmUmGmCmU*mA | UA | OX |
| WV-42536 | L025L025mC*mCmUmAmGmAfAmAfUfCfCmUmU | CCUAGAAAUCCUUCUGCUU | OOXOOOOOOOOOOOOOOOOO |
| | mCmUmGmCmUmUmC*mA | CA | OX |
| WV-42537 | L025L025mC*mUmGmCmUmUfCmUfGfAfUmCmA | CUGCUUCUGAUCACCAUCA | OOXOOOOOOOOOOOOOOOOO |
| | mCmCmAmUmCmAmU*mA | UA | OX |
| WV-42538 | L025L025mG*mCmUmUmCmUfGmAfUfCfAmCmC | GCUUCUGAUCACCAUCAUC | OOXOOOOOOOOOOOOOOOOO |
| | mAmUmCmAmUmCmU*mA | UA | OX |
| WV-42539 | L025L025mG*mGmGmGmAmGfAmUfUfGfUmUmC | GGGGAGAUUGUUCUCAUU | OOXOOOOOOOOOOOOOOOOO |
| | mUmCmAmUmUmAmC*mA | ACA | OX |
| WV-42540 | L025L025mG*mGmGmAmGmAfUmUfGfUfUmCmU | GGGAGAUUGUUCUCAUUA | OOXOOOOOOOOOOOOOOOOO |
| | mCmAmUmUmAmCmU*mA | CUA | OX |
| WV-42541 | L025L025mA*mAmAmGmAmAfGmUfGfGfGmUmG | AAAGAAGUGGGUGAUGUA | OOXOOOOOOOOOOOOOOOOO |
| | mAmUmGmUmAmAmC*mA | ACA | OX |
| WV-42542 | L025L025mG*mUmGmAmUmGfUmAfAfCfAmAmU | GUGAUGUAACAAUCGUGG | OOXOOOOOOOOOOOOOOOOO |
| | mCmGmUmGmGmUmG*mA | UGA | OX |
| WV-42543 | L025L025mU*mGmUmAmAmCfAmAfUfCfGmUmG | UGUAACAAUCGUGGUGAA | OOXOOOOOOOOOOOOOOOOO |
| | mGmUmGmAmAmUmA*mA | UAA | OX |
| WV-42544 | L025L025mA*mCmAmGmUmAfUmAfUfCfCmAmG | ACAGUAUAUCCAGCCGAUC | OOXOOOOOOOOOOOOOOOOO |
| | mCmCmGmAmUmCmU*mA | UA | OX |
| WV-42545 | L025L025mC*mAmGmCmAmCfCmAfAfGfGmAmUm | CAGCACCAAGGAUGAAGAG | OOXOOOOOOOOOOOOOOOOO |
| | GmAmAmGmAmGmA*mA | AA | OX |
| WV-42546 | L025L025mA*mGmCmAmCmCfAmAfGfGfAmUmG | AGCACCAAGGAUGAAGAGA | OOXOOOOOOOOOOOOOOOOO |
| | mAmAmGmAmGmAmU*mA | UA | OX |
| WV-42547 | L025L025mC*mCmAmAmGmGfAmUfGfAfAmGmA | CCAAGGAUGAAGAGAUUAC | OOXOOOOOOOOOOOOOOOOO |
| | mGmAmUmUmAmCmC*mA | CA | OX |
| WV-42548 | L025L025mG*mAmCmAmUmUfUmGfAfGfGmUmC | GACAUUUGAGGUCAACAUC | OOXOOOOOOOOOOOOOOOOO |
| | mAmAmCmAmUmCmC*mA | CA | OX |
| WV-42549 | L025L025mU*mCmCmUmAmGfGmAfCfAfUmUmU | UCCUAGGACAUUUUUGGA | OOXOOOOOOOOOOOOOOOOO |
| | mUmUmGmGmAmUmC*mA | UCA | OX |
| WV-42550 | L025L025mC*mUmAmGmGmAfCmAfUfUfUmUmU | CUAGGACAUUUUUGGAUC | OOXOOOOOOOOOOOOOOOOO |
| | mGmGmAmUmCmAmC*mA | ACA | OX |
| WV-42551 | L025L025mU*mUmGmGmAmUfCmAfCfAfAmAmA | UUGGAUCACAAAAGCACUU | OOXOOOOOOOOOOOOOOOOO |
| | mGmCmAmCmUmUmC*mA | CA | OX |
| WV-42552 | L025L025mU*mCmAmCmAmAfAmAfGfCfAmCmUm | UCACAAAAGCACUUCUUCC | OOXOOOOOOOOOOOOOOOOO |
| | UmCmUmUmCmCmA*mA | AA | OX |
| WV-42553 | L025L025mA*mUmCmCmCmAfUmAfUfUfGmUmU | AUCCCAUAUUGUUCCAGCA | OOXOOOOOOOOOOOOOOOOO |
| | mCmCmAmGmCmAmA*mA | AA | OX |
| WV-42554 | L025L025mG*mCmCmGmCmUfGmUfUfGfGmCmU | GCCGCUGUUGGCUUUCACA | OOXOOOOOOOOOOOOOOOOO |
| | mUmUmCmAmCmAmG*mA | GA | OX |
| WV-42555 | L025L025mU*mUmGmGmCmUfUmUfCfAfCmAmG | UUGGCUUUCACAGAGGUC | OOXOOOOOOOOOOOOOOOOO |
| | mAmGmGmUmCmUmG*mA | UGA | OX |
| WV-42556 | L025L025mG*mGmCmUmUmUfCmAfCfAfGmAmG | GGCUUUCACAGAGGUCUGA | OOXOOOOOOOOOOOOOOOOO |
| | mGmUmCmUmGmAmC*mA | CA | OX |
| WV-42557 | L025L025mA*mGmGmUmCmUfGmAfCfAfUmCmA | AGGUCUGACAUCAGAACUU | OOXOOOOOOOOOOOOOOOOO |
| | mGmAmAmCmUmUmC*mA | CA | OX |
| WV-42558 | L025L025mU*mUmGmGmGmAfAmAfAfAfCmUmG | UUGGGAAAAACUGGUAUC | OOXOOOOOOOOOOOOOOOOO |
| | mGmUmAmUmCmAmA*mA | AAA | OX |
| WV-42559 | L025L025mU*mGmGmGmAmAfAmAfAfCfUmGmG | UGGGAAAAACUGGUAUCAA | OOXOOOOOOOOOOOOOOOOO |
| | mUmAmUmCmAmAmA*mA | AA | OX |
| WV-42560 | L025L025mU*mGmGmUmAmUfCmAfAfAfAmCmC | UGGUAUCAAAACCUCAUGU | OOXOOOOOOOOOOOOOOOOO |
| | mUmCmAmUmGmUmC*mA | CA | OX |
| WV-42561 | L025L025mA*mGmCmAmCmAfAmGfAfUfUmAmU | AGCACAAGAUUAUGGCCUG | OOXOOOOOOOOOOOOOOOOO |
| | mGmGmCmCmUmGmU*mA | UA | OX |
| WV-42562 | L025L025mG*mCmAmCmAmAfGmAfUfUfAmUmG | GCACAAGAUUAUGGCCUGU | OOXOOOOOOOOOOOOOOOOO |
| | mGmCmCmUmGmUmA*mA | AA | OX |
| WV-42563 | L025L025mA*mAmGmAmUmUfAmUfGfGfCmCmU | AAGAUUAUGGCCUGUAUU | OOXOOOOOOOOOOOOOOOOO |
| | mGmUmAmUmUmGmG*mA | GGA | OX |
| WV-42564 | L025L025mA*mCmAmGmAmUfGmAfAfGfUmCmG | ACAGAUGAAGUCGUAAGAA | OOXOOOOOOOOOOOOOOOOO |
| | mUmAmAmGmAmAmG*mA | GA | OX |
| WV-42565 | L025L025mU*mAmAmGmAmAfGmUfCfUfGmAmU | UAAGAAGUCUGAUAGAUG | OOXOOOOOOOOOOOOOOOOO |
| | mAmGmAmUmGmGmA*mA | GAA | OX |
| WV-42566 | L025L025mA*mGmUmCmUmGfAmUfAfGfAmUmG | AGUCUGAUAGAUGGAAUA | OOXOOOOOOOOOOOOOOOOO |
| | mGmAmAmUmAmCmU*mA | CUA | OX |
| WV-42567 | L025L025mG*mUmCmUmGmAfUmAfGfAfUmGmG | GUCUGAUAGAUGGAAUAC | OOXOOOOOOOOOOOOOOOOO |
| | mAmAmUmAmCmUmU*mA | UUA | OX |
| WV-42568 | L025L025mU*mAmGmAmUmGfGmAfAfUfAmCmU | UAGAUGGAAUACUUACCAA | OOXOOOOOOOOOOOOOOOOO |
| | mUmAmCmCmAmAmU*mA | UA | OX |
| WV-42569 | L025L025mA*mGmAmUmGmGfAmAfUfAfCmUmU | AGAUGGAAUACUUACCAAU | OOXOOOOOOOOOOOOOOOOO |
| | mAmCmCmAmAmUmA*mA | AA | OX |
| WV-42570 | L025L025mA*mUmGmGmAmAfUmAfCfUfUmAmC | AUGGAAUACUUACCAAUAA | OOXOOOOOOOOOOOOOOOOO |
| | mCmAmAmUmAmAmG*mA | GA | OX |
| WV-42571 | L025L025mU*mGmGmAmAmUfAmCfUfUfAmCmC | UGGAAUACUUACCAAUAAG | OOXOOOOOOOOOOOOOOOOO |
| | mAmAmUmAmAmGmA*mA | AA | OX |
| WV-42572 | L025L025mA*mCmCmAmAmUfAmAfGfAfAmAmAm | ACCAAUAAGAAAAUGAUUU | OOXOOOOOOOOOOOOOOOOO |
| | UmGmAmUmUmUmU*mA | UA | OX |
| WV-42573 | L025L025mG*mCmCmCmAmAfAmAfCfGfGmUmGm | GCCCAAAACGGUGCAACUC | OOXOOOOOOOOOOOOOOOOO |
| | CmAmAmCmUmCmU*mA | UA | OX |
| WV-42574 | L025L025mG*mUmGmCmAmAfCmUfCfUfAmUmU | GUGCAACUCUAUUCUGGAC | OOXOOOOOOOOOOOOOOOOO |
| | mCmUmGmGmAmCmU*mA | UA | OX |
| WV-42575 | mU*SfG*RmAn001SmUmGfUmUmCmAmUn001Sm | UGAUGUUCAUGGCUUUGC | SRnSOOOOOOnSOOOOOOOOnS |
| | GmGmCfUmUfUmGmCmUn001SmCmU*SmU*SmU | UCUUU | OSS |
| WV-42576 | mU*SfU*RmUn001SmUmCfUmAmGmGmAn001Sm | UUUUCUAGGAUGAUGUUC | SRnSOOOOOOnSOOOOOOOOnS |
| | UmGmAfUmGfUmUmCmAn001SmUmG*SmU*SmU | AUGUU | OSS |
| WV-42577 | mU*SfG*RmAn001SmAmGfCmAmGmAmAn001Sm | UGAAGCAGAAGGAUUUCU | SRnSOOOOOOnSOOOOOOOOnS |
| | GmGmAfUmUfUmCmUmAn001SmGmG*SmU*SmU | AGGUU | OSS |
| WV-42578 | mU*SfG*RmUn001SmAmAfUmGmAmGmAn001Sm | UGUAAUGAGAACAAUCUCC | SRnSOOOOOOnSOOOOOOOOnS |
| | AmCmAfAmUfCmUmCmCn001SmCmC*SmU*SmU | CCUU | OSS |
| WV-42579 | mU*SfG*RmUn001SmUmAfCmAmUmCmAn001Sm | UGUUACAUCACCCACUUCU | SRnSOOOOOOnSOOOOOOOOnS |
| | CmCmCfAmCfUmUmCmUn001SmUmU*SmU*SmU | UUUU | OSS |
| WV-42580 | mU*SfG*RmUn001SmGmAfUmCmCmAmAn001Sm | UGUGAUCCAAAAAUGUCCU | SRnSOOOOOOnSOOOOOOOOnS |
| | AmAmAfUmGfUmCmCmUn001SmAmG*SmU*SmU | AGUU | OSS |
| WV-42581 | mU*SfG*RmAn001SmCmAfUmGmAmGmGn001Sm | UGACAUGAGGUUUUGAUA | SRnSOOOOOOnSOOOOOOOOnS |
| | UmUmUfUmGfAmUmAmCn001SmCmA*SmU*SmU | CCAUU | OSS |
| WV-42582 | mU*SfU*RmCn001SmUmUfAmUmUmGmGn001Sm | UUCUUAUUGGUAAGUAUU | SRnSOOOOOOnSOOOOOOOOnS |
| | UmAmAfGmUfAmUmUmCn001SmCmA*SmU*SmU | CCAUU | OSS |
| WV-42583 | Mod001L001mA*SmGmAmGmCmAfAmAfGfCfCmA | AGAGCAAAGCCAUGAACAU | OSOOOOOOOOOOOOOOOOOO |
| | mUmGmAmAmCmAmUmC*SmA | CA | S |
| WV-42584 | Mod001L001mC*SmAmUmGmAmAfCmAfUfCfAmU | CAUGAACAUCAUCCUAGAA | OSOOOOOOOOOOOOOOOOOO |
| | mCmCmUmAmGmAmAmA*SmA | AA | S |
| WV-42585 | Mod001L001mC*SmCmUmAmGmAfAmAfUfCfCmU | CCUAGAAAUCCUUCUGCUU | OSOOOOOOOOOOOOOOOOOO |
| | mUmCmUmGmCmUmUmC*SmA | CA | S |
| WV-42586 | Mod001L001mG*SmGmGmGmAmGfAmUfUfGfUm | GGGGAGAUUGUUCUCAUU | OSOOOOOOOOOOOOOOOOOO |
| | UmCmUmCmAmUmUmAmC*SmA | ACA | S |
| WV-42587 | Mod001L001mA*SmAmAmGmAmAfGmUfGfGfGm | AAAGAAGUGGGUGAUGUA | OSOOOOOOOOOOOOOOOOOO |
| | UmGmAmUmGmUmAmAmC*SmA | ACA | S |
| WV-42588 | Mod001L001mC*SmUmAmGmGmAfCmAfUfUfUmU | CUAGGACAUUUUUGGAUC | OSOOOOOOOOOOOOOOOOOO |
| | mUmGmGmAmUmCmAmC*SmA | ACA | S |
| WV-42589 | Mod001L001mU*SmGmGmUmAmUfCmAfAfAfAmC | UGGUAUCAAAACCUCAUGU | OSOOOOOOOOOOOOOOOOOO |
| | mCmUmCmAmUmGmUmC*SmA | CA | S |
| WV-42590 | Mod001L001mU*SmGmGmAmAmUfAmCfUfUfAmC | UGGAAUACUUACCAAUAAG | OSOOOOOOOOOOOOOOOOOO |
| | mCmAmAmUmAmAmGmA*SmA | AA | S |
| WV-42591 | L001mA*SmGmAmGmCmAfAmAfGfCfCmAmUmGm | AGAGCAAAGCCAUGAACAU | OSOOOOOOOOOOOOOOOOOO |
| | AmAmCmAmUmC*SmA | CA | S |
| WV-42592 | L001mC*SmAmUmGmAmAfCmAfUfCfAmUmCmCm | CAUGAACAUCAUCCUAGAA | OSOOOOOOOOOOOOOOOOOO |
| | UmAmGmAmAmA*SmA | AA | S |
| WV-42593 | L001mC*SmCmUmAmGmAfAmAfUfCfCmUmUmCm | CCUAGAAAUCCUUCUGCUU | OSOOOOOOOOOOOOOOOOOO |
| | UmGmCmUmUmC*SmA | CA | S |
| WV-42594 | L001mG*SmGmGmGmAmGfAmUfUfGfUmUmCmU | GGGGAGAUUGUUCUCAUU | OSOOOOOOOOOOOOOOOOOO |
| | mCmAmUmUmAmC*SmA | ACA | S |
| WV-42595 | L001mA*SmAmAmGmAmAfGmUfGfGfGmUmGmA | AAAGAAGUGGGUGAUGUA | OSOOOOOOOOOOOOOOOOOO |
| | mUmGmUmAmAmC*SmA | ACA | S |
| WV-42596 | L001mC*SmUmAmGmGmAfCmAfUfUfUmUmUmG | CUAGGACAUUUUUGGAUC | OSOOOOOOOOOOOOOOOOOO |
| | mGmAmUmCmAmC*SmA | ACA | S |
| WV-42597 | L001mU*SmGmGmUmAmUfCmAfAfAfAmCmCmU | UGGUAUCAAAACCUCAUGU | OSOOOOOOOOOOOOOOOOOO |
| | mCmAmUmGmUmC*SmA | CA | S |
| WV-42598 | L001mU*SmGmGmAmAmUfAmCfUfUfAmCmCmA | UGGAAUACUUACCAAUAAG | OSOOOOOOOOOOOOOOOOOO |
| | mAmUmAmAmGmA*SmA | AA | S |
| WV-42902 | mU*SfG*RmUn001SmUmAfCmAmUmCmAn001Sm | UGUUACAUCACCCACUUCU | SRnSOOOOOOnSOOSSSSSSn |
| | CmCmC*SfA*SmC*SfU*SmU*SmC*SmUn001SmU* | UUUU | SSSS |
| | SmU*SmU*SmU | | |
| WV-42903 | mU*SfG*RmAn001SmCmAfUmGmAmGmGn001Sm | UGACAUGAGGUUUUGAUA | SRnSOOOOOOnSOOSSSSSSn |
| | UmUmU*SfU*SmG*SfA*SmU*SmA*SmCn001SmC* | CCAUU | SSSS |
| | SmA*SmU*SmU | | |
| WV-43130 | mU*fG*mUmUmGfCmUmGmCmAmGmUmCfUmAf | UGUUGCUGCAGUCUACCAC | XXOOOOOOOOOOOOOOOOOO |
| | CmCmAmCmAmU*mU*mU | AUUU | XX |
| WV-43131 | mU*fC*mUmGmUfUmGmCmUmGmCmAmGfUmCf | UCUGUUGCUGCAGUCUACC | XXOOOOOOOOOOOOOOOOOO |
| | UmAmCmCmAmC*mU*mU | ACUU | XX |
| WV-43132 | mU*fC*mAmAmAfAmAmUmGmUmCmCmUfAmGf | UCAAAAAUGUCCUAGGAUG | XXOOOOOOOOOOOOOOOOOO |
| | GmAmUmGmUmU*mU*mU | UUUU | XX |
| WV-43133 | mU*fA*mAmUmAfUmUmCmUmGmCmAmUfAmCf | UAAUAUUCUGCAUACGAUU | XXOOOOOOOOOOOOOOOOOO |
| | GmAmUmUmUmA*mU*mU | UAUU | XX |
| WV-43134 | mU*fU*mUmGmAfAmUmAmUmUmCmUmGfCmAf | UUUGAAUAUUCUGCAUAC | XXOOOOOOOOOOOOOOOOOO |
| | UmAmCmGmAmU*mU*mU | GAUUU | XX |
| WV-43135 | mU*fA*mAmUmUfGmAmAmUmAmUmUmCfUmGf | UAAUUGAAUAUUCUGCAU | XXOOOOOOOOOOOOOOOOOO |
| | CmAmUmAmCmG*mU*mU | ACGUU | XX |
| WV-43136 | mU*fC*mAmAmAfUmUmGmAmAmUmAmUfUmCf | UCAAAUUGAAUAUUCUGCA | XXOOOOOOOOOOOOOOOOOO |
| | UmGmCmAmUmA*mU*mU | UAUU | XX |
| WV-43137 | mU*fA*mAmGmUfCmCmAmGmAmAmUmAfGmAf | UAAGUCCAGAAUAGAGUU | XXOOOOOOOOOOOOOOOOOO |
| | GmUmUmGmCmA*mU*mU | GCAUU | XX |
| WV-43138 | mU*fU*mAmAmAfGmUmCmCmAmGmAmAfUmAf | UUAAAGUCCAGAAUAGAGU | XXOOOOOOOOOOOOOOOOOO |
| | GmAmGmUmUmG*mU*mU | UGUU | XX |
| WV-43139 | mU*fC*mAmAmGfUmAmAmUmAmAmAmGfUmCf | UCAAGUAAUAAAGUCCAGA | XXOOOOOOOOOOOOOOOOOO |
| | CmAmGmAmAmU*mU*mU | AUUU | XX |
| WV-43140 | mU*fG*mAmGmGfGmUmCmCmAmCmUmUfUmUf | UGAGGGUCCACUUUUGGU | XXOOOOOOOOOOOOOOOOOO |
| | GmGmUmGmGmA*mU*mU | GGAUU | XX |
| WV-43141 | mU*fA*mGmAmGfGmGmUmCmCmAmCmUfUmUf | UAGAGGGUCCACUUUUGG | XXOOOOOOOOOOOOOOOOOO |
| | UmGmGmUmGmG*mU*mU | UGGUU | XX |
| WV-43142 | mU*fA*mUmAmGfAmGmGmGmUmCmCmAfCmUf | UAUAGAGGGUCCACUUUU | XXOOOOOOOOOOOOOOOOOO |
| | UmUmUmGmGmU*mU*mU | GGUUU | XX |
| WV-43143 | mU*fU*mAmUmAfGmAmGmGmGmUmCmCfAmCf | UUAUAGAGGGUCCACUUU | XXOOOOOOOOOOOOOOOOOO |
| | UmUmUmUmGmG*mU*mU | UGGUU | XX |
| WV-43144 | mU*fA*mAmGmGfGmAmGmGmAmAmAmUfAmUf | UAAGGGAGGAAAUAUAGA | XXOOOOOOOOOOOOOOOOOO |
| | AmGmAmGmGmG*mU*mU | GGGUU | XX |
| WV-43145 | mU*fU*mUmUmUfGmAmGmCmCmUmAmAfAmAf | UUUUUGAGCCUAAAAUUG | XXOOOOOOOOOOOOOOOOOO |
| | UmUmGmUmCmU*mU*mU | UCUUU | XX |
| WV-43146 | mU*fU*mAmAmUfAmGmCmCmAmGmUmAfCmAf | UUAAUAGCCAGUACAGUUC | XXOOOOOOOOOOOOOOOOOO |
| | GmUmUmCmCmU*mU*mU | CUUU | XX |
| WV-43147 | mU*fG*mUmAmAfUmAmGmCmCmAmGmUfAmCf | UGUAAUAGCCAGUACAGUU | XXOOOOOOOOOOOOOOOOOO |
| | AmGmUmUmCmC*mU*mU | CCUU | XX |
| WV-43148 | mU*fA*mGmUmGfGmGmAmGmUmCmGmGfAmUf | UAGUGGGAGUCGGAUUAU | XXOOOOOOOOOOOOOOOOOO |
| | UmAmUmUmUmU*mU*mU | UUUUU | XX |
| WV-43149 | mU*fG*mAmUmGfUmAmGmUmGmGmGmAfGmUf | UGAUGUAGUGGGAGUCGG | XXOOOOOOOOOOOOOOOOOO |
| | CmGmGmAmUmU*mU*mU | AUUUU | XX |
| WV-43150 | mU*fU*mGmAmUfGmUmAmGmUmGmGmGfAmGf | UUGAUGUAGUGGGAGUCG | XXOOOOOOOOOOOOOOOOOO |
| | UmCmGmGmAmU*mU*mU | GAUUU | XX |
| WV-43151 | mU*fU*mUmAmGfUmCmUmUmGmAmUmGfUmAf | UUUAGUCUUGAUGUAGUG | XXOOOOOOOOOOOOOOOOOO |
| | GmUmGmGmGmA*mU*mU | GGAUU | XX |
| WV-43152 | mU*fA*mUmUmAfGmUmCmUmUmGmAmUfGmUf | UAUUAGUCUUGAUGUAGU | XXOOOOOOOOOOOOOOOOOO |
| | AmGmUmGmGmG*mU*mU | GGGUU | XX |
| WV-43153 | mU*fG*mAmUmUfAmGmUmCmUmUmGmAfUmGf | UGAUUAGUCUUGAUGUAG | XXOOOOOOOOOOOOOOOOOO |
| | UmAmGmUmGmG*mU*mU | UGGUU | XX |
| WV-43154 | mU*fA*mGmAmUfUmAmGmUmCmUmUmGfAmUf | UAGAUUAGUCUUGAUGUA | XXOOOOOOOOOOOOOOOOOO |
| | GmUmAmGmUmG*mU*mU | GUGUU | XX |
| WV-43155 | mU*fC*mAmAmGfAmUmUmAmGmUmCmUfUmGf | UCAAGAUUAGUCUUGAUG | XXOOOOOOOOOOOOOOOOOO |
| | AmUmGmUmAmG*mU*mU | UAGUU | XX |
| WV-43156 | mU*fA*mCmAmUfGmUmGmAmAmAmAmAfCmAfC | UACAUGUGAAAAACACACA | XXOOOOOOOOOOOOOOOOOO |
| | mAmCmAmAmA*mU*mU | AAUU | XX |
| WV-43157 | mU*fA*mAmUmAfCmAmUmGmUmGmAmAfAmAf | UAAUACAUGUGAAAAACAC | XXOOOOOOOOOOOOOOOOOO |
| | AmCmAmCmAmC*mU*mU | ACUU | XX |
| WV-43158 | mU*fC*mUmAmUfAmAmUmAmCmAmUmGfUmGf | UCUAUAAUACAUGUGAAAA | XXOOOOOOOOOOOOOOOOOO |
| | AmAmAmAmAmC*mU*mU | ACUU | XX |
| WV-43159 | mU*fC*mCmAmUfGmCmAmAmAmAmGmCfAmUf | UCCAUGCAAAAGCAUUCUA | XXOOOOOOOOOOOOOOOOOO |
| | UmCmUmAmUmA*mU*mU | UAUU | XX |
| WV-43160 | mU*fU*mCmCmAfUmGmCmAmAmAmAmGfCmAf | UUCCAUGCAAAAGCAUUCU | XXOOOOOOOOOOOOOOOOOO |
| | UmUmCmUmAmU*mU*mU | AUUU | XX |
| WV-43161 | mU*fG*mUmCmCfAmUmGmCmAmAmAmAfGmCfA | UGUCCAUGCAAAAGCAUUC | XXOOOOOOOOOOOOOOOOOO |
| | mUmUmCmUmA*mU*mU | UAUU | XX |
| WV-43162 | mU*fA*mGmUmCfCmAmUmGmCmAmAmAfAmGfC | UAGUCCAUGCAAAAGCAUU | XXOOOOOOOOOOOOOOOOOO |
| | mAmUmUmCmU*mU*mU | CUUU | XX |
| WV-43163 | mU*fU*mAmGmUfCmCmAmUmGmCmAmAfAmAf | UUAGUCCAUGCAAAAGCAU | XXOOOOOOOOOOOOOOOOOO |
| | GmCmAmUmUmC*mU*mU | UCUU | XX |
| WV-43164 | mU*fG*mAmUmAfGmUmCmCmAmUmGmCfAmAf | UGAUAGUCCAUGCAAAAGC | XXOOOOOOOOOOOOOOOOOO |
| | AmAmGmCmAmU*mU*mU | AUUU | XX |
| WV-43165 | mU*fG*mGmAmUfAmGmUmCmCmAmUmGfCmAf | UGGAUAGUCCAUGCAAAAG | XXOOOOOOOOOOOOOOOOOO |
| | AmAmAmGmCmA*mU*mU | CAUU | XX |
| WV-43166 | mU*fA*mGmAmGfGmAmUmAmGmUmCmCfAmUf | UAGAGGAUAGUCCAUGCAA | XXOOOOOOOOOOOOOOOOOO |
| | GmCmAmAmAmA*mU*mU | AAUU | XX |
| WV-43167 | mU*fA*mAmGmAfGmGmAmUmAmGmUmCfCmAf | UAAGAGGAUAGUCCAUGCA | XXOOOOOOOOOOOOOOOOOO |
| | UmGmCmAmAmA*mU*mU | AAUU | XX |
| WV-43168 | mU*fC*mAmAmGfAmGmGmAmUmAmGmUfCmCf | UCAAGAGGAUAGUCCAUGC | XXOOOOOOOOOOOOOOOOOO |
| | AmUmGmCmAmA*mU*mU | AAUU | XX |
| WV-43169 | mU*fA*mAmCmAfAmGmAmGmGmAmUmAfGmUf | UAACAAGAGGAUAGUCCAU | XXOOOOOOOOOOOOOOOOOO |
| | CmCmAmUmGmC*mU*mU | GCUU | XX |
| WV-43170 | mU*fA*mAmAmCfAmAmGmAmGmGmAmUfAmGf | UAAACAAGAGGAUAGUCCA | XXOOOOOOOOOOOOOOOOOO |
| | UmCmCmAmUmG*mU*mU | UGUU | XX |
| WV-43171 | mU*fU*mAmAmUfAmAmAmAmAmCmAmAfGmAf | UUAAUAAAAACAAGAGGAU | XXOOOOOOOOOOOOOOOOOO |
| | GmGmAmUmAmG*mU*mU | AGUU | XX |
| WV-43172 | mU*fU*mUmAmAfUmAmAmAmAmAmCmAfAmGf | UUUAAUAAAAACAAGAGGA | XXOOOOOOOOOOOOOOOOOO |
| | AmGmGmAmUmA*mU*mU | UAUU | XX |
| WV-43173 | mU*fU*mAmAmCfUmAmCmAmAmGmAmGfGmUf | UUAACUACAAGAGGUUAU | XXOOOOOOOOOOOOOOOOOO |
| | UmAmUmUmUmU*mU*mU | UUUUU | XX |
| WV-43174 | mU*fU*mUmAmUfAmAmCmUmAmCmAmAfGmAf | UUUAUAACUACAAGAGGU | XXOOOOOOOOOOOOOOOOOO |
| | GmGmUmUmAmU*mU*mU | UAUUU | XX |
| WV-43175 | L025L025mA*mUmGmUmGmGfUmAfGfAfCmUmG | AUGUGGUAGACUGCAGCAA | OOXOOOOOOOOOOOOOOOOO |
| | mCmAmGmCmAmAmC*mA | CA | OX |
| WV-43176 | L025L025mG*mUmGmGmUmAfGmAfCfUfGmCmA | GUGGUAGACUGCAGCAACA | OOXOOOOOOOOOOOOOOOOO |
| | mGmCmAmAmCmAmG*mA | GA | OX |
| WV-43177 | L025L025mA*mAmCmAmUmCfCmUfAfGfGmAmCm | AACAUCCUAGGACAUUUUU | OOXOOOOOOOOOOOOOOOOO |
| | AmUmUmUmUmUmG*mA | GA | OX |
| WV-43178 | L025L025mU*mAmAmAmUmCfGmUfAfUfGmCmA | UAAAUCGUAUGCAGAAUAU | OOXOOOOOOOOOOOOOOOOO |
| | mGmAmAmUmAmUmU*mA | UA | OX |
| WV-43179 | L025L025mA*mUmCmGmUmAfUmGfCfAfGmAmA | AUCGUAUGCAGAAUAUUCA | OOXOOOOOOOOOOOOOOOOO |
| | mUmAmUmUmCmAmA*mA | AA | OX |
| WV-43180 | L025L025mC*mGmUmAmUmGfCmAfGfAfAmUmA | CGUAUGCAGAAUAUUCAAU | OOXOOOOOOOOOOOOOOOOO |
| | mUmUmCmAmAmUmU*mA | UA | OX |
| WV-43181 | L025L025mU*mAmUmGmCmAfGmAfAfUfAmUmU | UAUGCAGAAUAUUCAAUU | OOXOOOOOOOOOOOOOOOOO |
| | mCmAmAmUmUmUmG*mA | UGA | OX |
| WV-43182 | L025L025mU*mGmCmAmAmCfUmCfUfAfUmUmC | UGCAACUCUAUUCUGGACU | OOXOOOOOOOOOOOOOOOOO |
| | mUmGmGmAmCmUmU*mA | UA | OX |
| WV-43183 | L025L025mC*mAmAmCmUmCfUmAfUfUfCmUmG | CAACUCUAUUCUGGACUUU | OOXOOOOOOOOOOOOOOOOO |
| | mGmAmCmUmUmUmA*mA | AA | OX |
| WV-43184 | L025L025mA*mUmUmCmUmGfGmAfCfUfUmUmA | AUUCUGGACUUUAUUACU | OOXOOOOOOOOOOOOOOOOO |
| | mUmUmAmCmUmUmG*mA | UGA | OX |
| WV-43185 | L025L025mU*mCmCmAmCmCfAmAfAfAfGmUmGm | UCCACCAAAAGUGGACCCU | OOXOOOOOOOOOOOOOOOOO |
| | GmAmCmCmCmUmC*mA | CA | OX |
| WV-43186 | L025L025mC*mCmAmCmCmAfAmAfAfGfUmGmGm | CCACCAAAAGUGGACCCUC | OOXOOOOOOOOOOOOOOOOO |
| | AmCmCmCmUmCmU*mA | UA | OX |
| WV-43187 | L025L025mA*mCmCmAmAmAfAmGfUfGfGmAmCm | ACCAAAAGUGGACCCUCUA | OOXOOOOOOOOOOOOOOOOO |
| | CmCmUmCmUmAmU*mA | UA | OX |
| WV-43188 | L025L025mC*mCmAmAmAmAfGmUfGfGfAmCmCm | CCAAAAGUGGACCCUCUAU | OOXOOOOOOOOOOOOOOOOO |
| | CmUmCmUmAmUmA*mA | AA | OX |
| WV-43189 | L025L025mC*mCmCmUmCmUfAmUfAfUfUmUmC | CCCUCUAUAUUUCCUCCCU | OOXOOOOOOOOOOOOOOOOO |
| | mCmUmCmCmCmUmU*mA | UA | OX |
| WV-43190 | L025L025mA*mGmAmCmAmAfUmUfUfUfAmGmG | AGACAAUUUUAGGCUCAAA | OOXOOOOOOOOOOOOOOOOO |
| | mCmUmCmAmAmAmA*mA | AA | OX |
| WV-43191 | L025L025mA*mGmGmAmAmCfUmGfUfAfCmUmG | AGGAACUGUACUGGCUAU | OOXOOOOOOOOOOOOOOOOO |
| | mGmCmUmAmUmUmA*mA | UAA | OX |
| WV-43192 | L025L025mG*mGmAmAmCmUfGmUfAfCfUmGmG | GGAACUGUACUGGCUAUU | OOXOOOOOOOOOOOOOOOOO |
| | mCmUmAmUmUmAmC*mA | ACA | OX |
| WV-43193 | L025L025mA*mAmAmAmUmAfAmUfCfCfGmAmCm | AAAAUAAUCCGACUCCCAC | OOXOOOOOOOOOOOOOOOOO |
| | UmCmCmCmAmCmU*mA | UA | OX |
| WV-43194 | L025L025mA*mAmUmCmCmGfAmCfUfCfCmCmAm | AAUCCGACUCCCACUACAUC | OOXOOOOOOOOOOOOOOOOO |
| | CmUmAmCmAmUmC*mA | A | OX |
| WV-43195 | L025L025mA*mUmCmCmGmAfCmUfCfCfCmAmCm | AUCCGACUCCCACUACAUCA | OOXOOOOOOOOOOOOOOOOO |
| | UmAmCmAmUmCmA*mA | A | OX |
| WV-43196 | L025L025mU*mCmCmCmAmCfUmAfCfAfUmCmAm | UCCCACUACAUCAAGACUA | OOXOOOOOOOOOOOOOOOOO |
| | AmGmAmCmUmAmA*mA | AA | OX |
| WV-43197 | L025L025mC*mCmCmAmCmUfAmCfAfUfCmAmAm | CCCACUACAUCAAGACUAA | OOXOOOOOOOOOOOOOOOOO |
| | GmAmCmUmAmAmU*mA | UA | OX |
| WV-43198 | L025L025mC*mCmAmCmUmAfCmAfUfCfAmAmGm | CCACUACAUCAAGACUAAU | OOXOOOOOOOOOOOOOOOOO |
| | AmCmUmAmAmUmC*mA | CA | OX |
| WV-43199 | L025L025mC*mAmCmUmAmCfAmUfCfAfAmGmAm | CACUACAUCAAGACUAAUC | OOXOOOOOOOOOOOOOOOOO |
| | CmUmAmAmUmCmU*mA | UA | OX |
| WV-43200 | L025L025mC*mUmAmCmAmUfCmAfAfGfAmCmUm | CUACAUCAAGACUAAUCUU | OOXOOOOOOOOOOOOOOOOO |
| | AmAmUmCmUmUmG*mA | GA | OX |
| WV-43201 | L025L025mU*mUmUmGmUmGfUmGfUfUfUmUmU | UUUGUGUGUUUUUCACAU | OOXOOOOOOOOOOOOOOOOO |
| | mCmAmCmAmUmGmU*mA | GUA | OX |
| WV-43202 | L025L025mG*mUmGmUmGmUfUmUfUfUfCmAmC | GUGUGUUUUUCACAUGUA | OOXOOOOOOOOOOOOOOOOO |
| | mAmUmGmUmAmUmU*mA | UUA | OX |
| WV-43203 | L025L025mG*mUmUmUmUmUfCmAfCfAfUmGmU | GUUUUUCACAUGUAUUAU | OOXOOOOOOOOOOOOOOOOO |
| | mAmUmUmAmUmAmG*mA | AGA | OX |
| WV-43204 | L025L025mU*mAmUmAmGmAfAmUfGfCfUmUmU | UAUAGAAUGCUUUUGCAU | OOXOOOOOOOOOOOOOOOOO |
| | mUmGmCmAmUmGmG*mA | GGA | OX |
| WV-43205 | L025L025mA*mUmAmGmAmAfUmGfCfUfUmUmU | AUAGAAUGCUUUUGCAUG | OOXOOOOOOOOOOOOOOOOO |
| | mGmCmAmUmGmGmA*mA | GAA | OX |
| WV-43206 | L025L025mU*mAmGmAmAmUfGmCfUfUfUmUmG | UAGAAUGCUUUUGCAUGG | OOXOOOOOOOOOOOOOOOOO |
| | mCmAmUmGmGmAmC*mA | ACA | OX |
| WV-43207 | L025L025mA*mGmAmAmUmGfCmUfUfUfUmGmC | AGAAUGCUUUUGCAUGGA | OOXOOOOOOOOOOOOOOOOO |
| | mAmUmGmGmAmCmU*mA | CUA | OX |
| WV-43208 | L025L025mG*mAmAmUmGmCfUmUfUfUfGmCmA | GAAUGCUUUUGCAUGGAC | OOXOOOOOOOOOOOOOOOOO |
| | mUmGmGmAmCmUmA*mA | UAA | OX |
| WV-43209 | L025L025mA*mUmGmCmUmUfUmUfGfCfAmUmG | AUGCUUUUGCAUGGACUA | OOXOOOOOOOOOOOOOOOOO |
| | mGmAmCmUmAmUmC*mA | UCA | OX |
| WV-43210 | L025L025mU*mGmCmUmUmUfUmGfCfAfUmGmG | UGCUUUUGCAUGGACUAU | OOXOOOOOOOOOOOOOOOOO |
| | mAmCmUmAmUmCmC*mA | CCA | OX |
| WV-43211 | L025L025mU*mUmUmUmGmCfAmUfGfGfAmCmU | UUUUGCAUGGACUAUCCUC | OOXOOOOOOOOOOOOOOOOO |
| | mAmUmCmCmUmCmU*mA | UA | OX |
| WV-43212 | L025L025mU*mUmUmGmCmAfUmGfGfAfCmUmA | UUUGCAUGGACUAUCCUCU | OOXOOOOOOOOOOOOOOOOO |
| | mUmCmCmUmCmUmU*mA | UA | OX |
| WV-43213 | L025L025mU*mUmGmCmAmUfGmGfAfCfUmAmU | UUGCAUGGACUAUCCUCUU | OOXOOOOOOOOOOOOOOOOO |
| | mCmCmUmCmUmUmG*mA | GA | OX |
| WV-43214 | L025L025mG*mCmAmUmGmGfAmCfUfAfUmCmC | GCAUGGACUAUCCUCUUGU | OOXOOOOOOOOOOOOOOOOO |
| | mUmCmUmUmGmUmU*mA | UA | OX |
| WV-43215 | L025L025mC*mAmUmGmGmAfCmUfAfUfCmCmU | CAUGGACUAUCCUCUUGUU | OOXOOOOOOOOOOOOOOOOO |
| | mCmUmUmGmUmUmU*mA | UA | OX |
| WV-43216 | L025L025mC*mUmAmUmCmCfUmCfUfUfGmUmU | CUAUCCUCUUGUUUUUAU | OOXOOOOOOOOOOOOOOOOO |
| | mUmUmUmAmUmUmA*mA | UAA | OX |
| WV-43217 | L025L025mU*mAmUmCmCmUfCmUfUfGfUmUmU | UAUCCUCUUGUUUUUAUU | OOXOOOOOOOOOOOOOOOOO |
| | mUmUmAmUmUmAmA*mA | AAA | OX |
| WV-43218 | L025L025mA*mAmAmAmUmAfAmCfCfUfCmUmU | AAAAUAACCUCUUGUAGUU | OOXOOOOOOOOOOOOOOOOO |
| | mGmUmAmGmUmUmA*mA | AA | OX |
| WV-43219 | L025L025mA*mUmAmAmCmCfUmCfUfUfGmUmA | AUAACCUCUUGUAGUUAUA | OOXOOOOOOOOOOOOOOOOO |
| | mGmUmUmAmUmAmA*mA | AA | OX |
| WV-44171 | L001mC*mGmUmAmUmGfCmAfGfAfAmUmAmUm | CGUAUGCAGAAUAUUCAAU | OXOOOOOOOOOOOOOOOOOO |
| | UmCmAmAmUmU*mA | UA | X |
| WV-44172 | L001mU+mAmUmGmCmAfGmAfAfUfAmUmUmCm | UAUGCAGAAUAUUCAAUU | OXOOOOOOOOOOOOOOOOOO |
| | AmAmUmUmUmG*mA | UGA | X |
| WV-44173 | Mod001L001mC*mGmUmAmUmGfCmAfGfAfAmU | CGUAUGCAGAAUAUUCAAU | OXOOOOOOOOOOOOOOOOOO |
| | mAmUmUmCmAmAmUmU*mA | UA | X |
| WV-44174 | Mod001L001mUmAmUmGmCmAfGmAfAfUfAmU | UAUGCAGAAUAUUCAAUU | OXOOOOOOOOOOOOOOOOOO |
| | mUmCmAmAmUmUmUmG*mA | UGA | X |
| WV-45021 | mU*RfG*SmUmGmAfUmCmCmAmAmAmAmAfUm | UGUGAUCCAAAAAUGUCCU | RSOOOOOOOOOOOOOOOOOO |
| | GfUmCmCmUmAmG*SmU*SmU | AGUU | SS |
| WV-45022 | mU*SfG*RmUmGmAfUmCmCmAmAmAmAmAfUm | UGUGAUCCAAAAAUGUCCU | SROOOOOOOOOOOOOOOOOO |
| | GfUmCmCmUmAmG*SmU*SmU | AGUU | SS |
| WV-45023 | mU*RfG*SmUmGmAfUmCmCmAmAmAmAmAfUm | UGUGAUCCAAAAAUGUCCU | RSOOOOOOOOOOOOOOOOOO |
| | GfUmCmCmUmAmG*SmUn001RmU | AGUU | SnR |
| WV-45024 | mU*SfG*RmUmGmAfUmCmCmAmAmAmAmAfUm | UGUGAUCCAAAAAUGUCCU | RSOOOOOOOOOOOOOOOOOO |
| | GfUmCmCmUmAmG*SmUn001RmU | AGUU | SnR |
| WV-45025 | mU*RfG*SmUmGmAfUmCmCmAmAmAmAmAfUm | UGUGAUCCAAAAAUGUCCU | RSOOOOOOOOOOOOOOOOOO |
| | GfUmCmCmUmAmG*SmUn001SmU | AGUU | SnS |
| WV-45026 | mU*SfG*RmUmGmAfUmCmCmAmAmAmAmAfUm | UGUGAUCCAAAAAUGUCCU | SROOOOOOOOOOOOOOOOOO |
| | GfUmCmCmUmAmG*SmUn001SmU | AGUU | SnS |
| WV-45027 | mU*RfG*SmUmGmAfUmCmCmAmAmAmAmAfUm | UGUGAUCCAAAAAUGUCCU | RSOOOOOOOOOOOOOOOOOO |
| | GfUmCmCmUmAmGmUn001RmU | AGUU | OnR |
| WV-45028 | mU*SfG*RmUmGmAfUmCmCmAmAmAmAmAfUm | UGUGAUCCAAAAAUGUCCU | SROOOOOOOOOOOOOOOOOO |
| | GfUmCmCmUmAmGmUn001RmU | AGUU | OnR |
| WV-45029 | mU*RfG*SmUmGmAfUmCmCmAmAmAmAmAfUm | UGUGAUCCAAAAAUGUCCU | RSOOOOOOOOOOOOOOOOOO |
| | GfUmCmCmUmAmGmUn001SmU | AGUU | OnS |
| WV-45030 | mU*SfG*RmUmGmAfUmCmCmAmAmAmAmAfUm | UGUGAUCCAAAAAUGUCCU | SROOOOOOOOOOOOOOOOOO |
| | GfUmCmCmUmAmGmUn001SmU | AGUU | OnS |
| WV-45031 | mU*RfG*SmUmGmAfUmCfCmAmAmAfAmAfUmGf | UGUGAUCCAAAAAUGUCCU | RSOOOOOOOOOOOOOOOOOO |
| | UmCmCmUmAmG*SmU*SmU | AGUU | SS |
| WV-45032 | mU*SfG*RmUmGmAfUmCfCmAmAmAfAmAfUmGf | UGUGAUCCAAAAAUGUCCU | SROOOOOOOOOOOOOOOOOO |
| | UmCmCmUmAmG*SmU*SmU | AGUU | SS |
| WV-45033 | mU*RfG*SmUmGmAfUmCfCmAmAmAfAmAfUmGf | UGUGAUCCAAAAAUGUCCU | RSOOOOOOOOOOOOOOOOOO |
| | UmCmCmUmAmG*SmUn001RmU | AGUU | SnR |
| WV-45034 | mU*SfG*RmUmGmAfUmCfCmAmAmAfAmAfUmGf | UGUGAUCCAAAAAUGUCCU | SROOOOOOOOOOOOOOOOOO |
| | UmCmCmUmAmG*SmUn001RmU | AGUU | SnR |
| WV-45035 | mU*RfG*SmUmGmAfUmCfCmAmAmAfAmAfUmGf | UGUGAUCCAAAAAUGUCCU | RSOOOOOOOOOOOOOOOOOO |
| | UmCmCmUmAmG*SmUn001SmU | AGUU | SnS |
| WV-45036 | mU*SfG*RmUmGmAfUmCfCmAmAmAfAmAfUmGf | UGUGAUCCAAAAAUGUCCU | SROOOOOOOOOOOOOOOOOO |
| | UmCmCmUmAmG*SmUn001SmU | AGUU | SnS |
| WV-45037 | mU*RfG*SmUmGmAfUmCfCmAmAmAfAmAfUmGf | UGUGAUCCAAAAAUGUCCU | RSOOOOOOOOOOOOOOOOOO |
| | UmCmCmUmAmGmUn001RmU | AGUU | OnR |
| WV-45038 | mU*SfG*RmUmGmAfUmCfCmAmAmAfAmAfUmGf | UGUGAUCCAAAAAUGUCCU | SROOOOOOOOOOOOOOOOOO |
| | UmCmCmUmAmGmUn001RmU | AGUU | OnR |
| WV-45039 | mU*RfG*SmUmGmAfUmCfCmAmAmAfAmAfUmGf | UGUGAUCCAAAAAUGUCCU | RSOOOOOOOOOOOOOOOOOO |
| | UmCmCmUmAmGmUn001SmU | AGUU | OnS |
| WV-45040 | mU*SfG*RmUmGmAfUmCfCmAmAmAfAmAfUmGf | UGUGAUCCAAAAAUGUCCU | SROOOOOOOOOOOOOOOOOO |
| | UmCmCmUmAmGmUn001SmU | AGUU | OnS |
| WV-45041 | mU*RfG*SmAmCmAfUmGmAmGmGmUmUmUfUm | UGACAUGAGGUUUUGAUA | RSOOOOOOOOOOOOOOOOOO |
| | GfAmUmAmCmCmA*SmU*SmU | CCAUU | SS |
| WV-45042 | mU*SfG*RmAmCmAfUmGmAmGmGmUmUmUfUm | UGACAUGAGGUUUUGAUA | SROOOOOOOOOOOOOOOOOO |
| | GfAmUmAmCmCmA*SmU*SmU | CCAUU | SS |
| WV-45043 | mU*RfG*SmAmCmAfUmGmAmGmGmUmUmUfUm | UGACAUGAGGUUUUGAUA | SROOOOOOOOOOOOOOOOOO |
| | GfAmUmAmCmCmA*SmUn001RmU | CCAUU | SnR |
| WV-45044 | mU*SfG*RmAmCmAfUmGmAmGmGmUmUmUfUm | UGACAUGAGGUUUUGAUA | SROOOOOOOOOOOOOOOOOO |
| | GfAmUmAmCmCmA*SmUn001RmU | CCAUU | SnR |
| WV-45045 | mU*RfG*SmAmCmAfUmGmAmGmGmUmUmUfUm | UGACAUGAGGUUUUGAUA | RSOOOOOOOOOOOOOOOOOO |
| | GfAmUmAmCmCmA*SmUn001SmU | CCAUU | SnS |
| WV-45046 | mU*SfG*RmAmCmAfUmGmAmGmGmUmUmUfUm | UGACAUGAGGUUUUGAUA | SROOOOOOOOOOOOOOOOOO |
| | GfAmUmAmCmCmA*SmUn001SmU | CCAUU | SnS |
| WV-45047 | mU*RfG*SmAmCmAfUmGmAmGmGmUmUmUfUm | UGACAUGAGGUUUUGAUA | RSOOOOOOOOOOOOOOOOOO |
| | GfAmUmAmCmCmAmUn001RmU | CCAUU | OnR |
| WV-45048 | mU*SfG*RmAmCmAfUmGmAmGmGmUmUmUfUm | UGACAUGAGGUUUUGAUA | SROOOOOOOOOOOOOOOOOO |
| | GfAmUmAmCmCmAmUn001RmU | CCAUU | OnR |
| WV-45049 | mU*RfG*SmAmCmAfUmGmAmGmGmUmUmUfUm | UGACAUGAGGUUUUGAUA | RSOOOOOOOOOOOOOOOOOO |
| | GfAmUmAmCmCmAmUn001SmU | CCAUU | OnS |
| WV-45050 | mU*SfG*RmAmCmAfUmGmAmGmGmUmUmUfUm | UGACAUGAGGUUUUGAUA | SROOOOOOOOOOOOOOOOOO |
| | GfAmUmAmCmCmAmUn001SmU | CCAUU | OnS |
| WV-45051 | mU*RfG*SmAmCmAfUmGfAmGmGmUfUmUfUmGf | UGACAUGAGGUUUUGAUA | RSOOOOOOOOOOOOOOOOOO |
| | AmUmAmCmCmA*SmU*SmU | CCAUU | SS |
| WV-45052 | mU*SfG*RmAmCmAfUmGfAmGmGmUfUmUfUmGf | UGACAUGAGGUUUUGAUA | SROOOOOOOOOOOOOOOOOO |
| | AmUmAmCmCmA*SmU*SmU | CCAUU | SS |
| WV-45053 | mU*RfG*SmAmCmAfUmGfAmGmGmUfUmUfUmGf | UGACAUGAGGUUUUGAUA | RSOOOOOOOOOOOOOOOOOO |
| | AmUmAmCmCmA*SmUn001RmU | CCAUU | SnR |
| WV-45054 | mU*SfG*RmAmCmAfUmGfAmGmGmUfUmUfUmGf | UGACAUGAGGUUUUGAUA | SROOOOOOOOOOOOOOOOOO |
| | AmUmAmCmCmA*SmUn001RmU | CCAUU | SnR |
| WV-45055 | mU*RfG*SmAmCmAfUmGfAmGmGmUfUmUfUmGf | UGACAUGAGGUUUUGAUA | RSOOOOOOOOOOOOOOOOOO |
| | AmUmAmCmCmA*SmUn001SmU | CCAUU | SnS |
| WV-45056 | mU*SfG*RmAmCmAfUmGfAmGmGmUfUmUfUmGf | UGACAUGAGGUUUUGAUA | SROOOOOOOOOOOOOOOOOO |
| | AmUmAmCmCmA*SmUn001SmU | CCAUU | SnS |
| WV-45057 | mU*RfG*SmAmCmAfUmGfAmGmGmUfUmUfUmGf | UGACAUGAGGUUUUGAUA | RSOOOOOOOOOOOOOOOOOO |
| | AmUmAmCmCmAmUn001RmU | CCAUU | OnR |
| WV-45058 | mU*SfG*RmAmCmAfUmGfAmGmGmUfUmUfUmGf | UGACAUGAGGUUUUGAUA | SROOOOOOOOOOOOOOOOOO |
| | AmUmAmCmCmAmUn001RmU | CCAUU | OnR |
| WV-45059 | mU*RfG*SmAmCmAfUmGfAmGmGmUfUmUfUmGf | UGACAUGAGGUUUUGAUA | RSOOOOOOOOOOOOOOOOOO |
| | AmUmAmCmCmAmUn001SmU | CCAUU | OnS |
| WV-45060 | mU*SfG*RmAmCmAfUmGfAmGmGmUfUmUfUmGf | UGACAUGAGGUUUUGAUA | SROOOOOOOOOOOOOOOOOO |
| | AmUmAmCmCmAmUn001SmU | CCAUU | OnS |
| WV-46471 | mU*RfG*SmUn001SmGmAfUmCmCmAmAn001Sm | UGUGAUCCAAAAAUGUCCU | RSnSOOOOOOnSOOOOOOOOnS |
| | AmAmAfUmGfUmCmCmUn001SmAmG*SmU*SmU | AGUU | OSS |
| WV-46472 | mU*RfG*SmUmGmAfUmCmCmAmAn001SmAmAm | UGUGAUCCAAAAAUGUCCU | RSOOOOOOOnSOOOOOOOOnS |
| | AfUmGfUmCmCmUn001SmAmG*SmU*SmU | AGUU | OSS |
| WV-46473 | mU*RfG*SmUn001SmGmAfUmCmCmAmAmAmAm | UGUGAUCCAAAAAUGUCCU | RSnSOOOOOOOOOOOOOOOnS |
| | AfUmGfUmCmCmUn001SmAmG*SmU*SmU | AGUU | OSS |
| WV-46474 | mU*RfG*SmUn001SmGmAfUmCmCmAmAn001Sm | UGUGAUCCAAAAAUGUCCU | RSnSOOOOOOnSOOOOOOOOO |
| | AmAmAfUmGfUmCmCmUmAmG*SmU*SmU | AGUU | OSS |
| WV-46475 | mU*RfG*SmUmGmAfUmCmCmAmAmAmAmAfUm | UGUGAUCCAAAAAUGUCCU | RSOOOOOOOOOOOOOOOOnSO |
| | GfUmCmCmUn001SmAmG*SmU*SmU | AGUU | SS |
| WV-46476 | mU*RfG*SmUmGmAfUmCmCmAmAn001SmAmAm | UGUGAUCCAAAAAUGUCCU | RSOOOOOOOnSOOOOOOOOOO |
| | AfUmGfUmCmCmUmAmG*SmU*SmU | AGUU | SS |
| WV-46477 | mU*RfG*SmUn001SmGmAfUmCmCmAmAmAmAm | UGUGAUCCAAAAAUGUCCU | RSnSOOOOOOOOOOOOOOOOO |
| | AfUmGfUmCmCmUmAmG*SmU*SmU | AGUU | SS |
| WV-46478 | mU*SfG*RmUmGmAfUmCmCmAmAn001SmAmAm | UGUGAUCCAAAAAUGUCCU | SROOOOOOOnSOOOOOOOOnS |
| | AfUmGfUmCmCmUn001SmAmG*SmU*SmU | AGUU | OSS |
| WV-46479 | mU*SfG*RmUn001SmGmAfUmCmCmAmAmAmAm | UGUGAUCCAAAAAUGUCCU | SRnSOOOOOOOOOOOOOOOnS |
| | AfUmGfUmCmCmUn001SmAmG*SmU*SmU | AGUU | OSS |
| WV-46480 | mU*SfG*RmUn001SmGmAfUmCmCmAmAn001Sm | UGUGAUCCAAAAAUGUCCU | SRnSOOOOOOnSOOOOOOOOO |
| | AmAmAfUmGfUmCmCmUmAmG*SmU*SmU | AGUU | OSS |
| WV-46481 | mU*SfG*RmUmGmAfUmCmCmAmAmAmAmAfUm | UGUGAUCCAAAAAUGUCCU | SROOOOOOOOOOOOOOOOnSO |
| | GfUmCmCmUn001SmAmG*SmU*SmU | AGUU | SS |
| WV-46482 | mU*SfG*RmUmGmAfUmCmCmAmAn001SmAmAm | UGUGAUCCAAAAAUGUCCU | SROOOOOOOnSOOOOOOOOOO |
| | AfUmGfUmCmCmUmAmG*SmU*SmU | AGUU | SS |
| WV-46483 | mU*SfG*RmUn001SmGmAfUmCmCmAmAmAmAm | UGUGAUCCAAAAAUGUCCU | SRnSOOOOOOOOOOOOOOOOO |
| | AfUmGfUmCmCmUmAmG*SmU*SmU | AGUU | SS |
| WV-46484 | mU*RfG*SmAn001SmCmAfUmGmAmGmGn001Sm | UGACAUGAGGUUUUGAUA | RSnSOOOOOOnSOOOOOOOOnS |
| | UmUmUfUmGfAmUmAmCn001SmCmA*SmU*SmU | CCAUU | OSS |
| WV-46485 | mU*RfG*SmAmCmAfUmGmAmGmGn001SmUmU | UGACAUGAGGUUUUGAUA | RSOOOOOOOnSOOOOOOOOnS |
| | mUfUmGfAmUmAmCn001SmCmA*SmU*SmU | CCAUU | OSS |
| WV-46486 | mU*RfG*SmAn001SmCmAfUmGmAmGmGmUmU | UGACAUGAGGUUUUGAUA | RSnSOOOOOOOOOOOOOOOnS |
| | mUfUmGfAmUmAmCn001SmCmA*SmU*SmU | CCAUU | OSS |
| WV-46487 | mU*RfG*SmAn001SmCmAfUmGmAmGmGn001Sm | UGACAUGAGGUUUUGAUA | RSnSOOOOOOnSOOOOOOOOO |
| | UmUmUfUmGfAmUmAmCmCmA*SmU*SmU | CCAUU | OSS |
| WV-46488 | mU*RfG*SmAmCmAfUmGmAmGmGmUmUmUfUm | UGACAUGAGGUUUUGAUA | RSOOOOOOOOOOOOOOOOnSO |
| | GfAmUmAmCn001SmCmA*SmU*SmU | CCAUU | SS |
| WV-46489 | mU*RfG*SmAmCmAfUmGmAmGmGn001SmUmU | UGACAUGAGGUUUUGAUA | RSOOOOOOOnSOOOOOOOOOO |
| | mUfUmGfAmUmAmCmCmA*SmU*SmU | CCAUU | SS |
| WV-46490 | mU*RfG*SmAn001SmCmAfUmGmAmGmGmUmU | UGACAUGAGGUUUUGAUA | RSnSOOOOOOOOOOOOOOOOO |
| | mUfUmGfAmUmAmCmCmA*SmU*SmU | CCAUU | SS |
| WV-46491 | mU*SfG*RmAmCmAfUmGmAmGmGn001SmUmU | UGACAUGAGGUUUUGAUA | SROOOOOOOnSOOOOOOOOnS |
| | mUfUmGfAmUmAmCn001SmCmA*SmU*SmU | CCAUU | OSS |
| WV-46492 | mU*SfG*RmAn001SmCmAfUmGmAmGmGmUmU | UGACAUGAGGUUUUGAUA | SRnSOOOOOOOOOOOOOOOnS |
| | mUfUmGfAmUmAmCn001SmCmA*SmU*SmU | CCAUU | OSS |
| WV-46493 | mU*SfG*RmAn001SmCmAfUmGmAmGmGn001Sm | UGACAUGAGGUUUUGAUA | SRnSOOOOOOnSOOOOOOOOO |
| | UmUmUfUmGfAmUmAmCmCmA*SmU*SmU | CCAUU | OSS |
| WV-46494 | mU*SfG*RmAmCmAfUmGmAmGmGmUmUmUfUm | UGACAUGAGGUUUUGAUA | SROOOOOOOOOOOOOOOOnSO |
| | GfAmUmAmCn001SmCmA*SmU*SmU | CCAUU | SS |
| WV-46495 | mU*SfG*RmAmCmAfUmGmAmGmGn001SmUmU | UGACAUGAGGUUUUGAUA | SROOOOOOOnSOOOOOOOOOO |
| | mUfUmGfAmUmAmCmCmA*SmU*SmU | CCAUU | SS |
| WV-46496 | mU*SfG*RmAn001SmCmAfUmGmAmGmGmUmU | UGACAUGAGGUUUUGAUA | SRnSOOOOOOOOOOOOOOOOO |
| | mUfUmGfAmUmAmCmCmA*SmU*SmU | CCAUU | SS |
| WV-47138 | mU*RfG*SmAn001SfCmAfUmGmAmGmGmUmUm | UGACAUGAGGUUUUGAUA | RSnSOOOOOOOOOOOOOOOOO |
| | UfUmGfAmUmAmCmCmA*SmU*SmU | CCAUU | SS |
| WV-47139 | mU*SfG*RmAn001SfCmAfUmGmAmGmGmUmUm | UGACAUGAGGUUUUGAUA | SRnSOOOOOOOOOOOOOOOOO |
| | UfUmGfAmUmAmCmCmA*SmU*SmU | CCAUU | SS |
| WV-47140 | mU*SfG*RmUn001SfGmAfUmCmCmAmAmAmAmA | UGUGAUCCAAAAAUGUCCU | SRnSOOOOOOOOOOOOOOOOO |
| | fUmGfUmCmCmUmAmG*SmU*SmU | AGUU | SS |
| WV-47158 | mU*RfG*SmAn001SfCmAfUmGmAmGmGn001SfU | UGACAUGAGGUUUUGAUA | RSnSOOOOOOnSOOOOOOOOO |
| | mUmUfUmGfAmUmAmCmCmA*SmU*SmU | CCAUU | OSS |
| WV-47159 | mU*SfG*RmAn001SfCmAfUmGmAmGmGn001SfU | UGACAUGAGGUUUUGAUA | SRnSOOOOOOnSOOOOOOOOO |
| | mUmUfUmGfAmUmAmCmCmA*SmU*SmU | CCAUU | OSS |
| WV-49590 | mU*SfG*RmAn001SfCmAfUmGmAmGmGn001RfU | UGACAUGAGGUUUUGAUA | SRnSOOOOOOnROOOOOOOOO |
| | mUmUfUmGfAmUmAmCmCmA*SmU*SmU | CCAUU | OSS |
| WV-49591 | mU*SfG*RmAmCmAfUmGmAmGmGn001RfUmUm | UGACAUGAGGUUUUGAUA | SROOOOOOOnROOOOOOOOOO |
| | UfUmGfAmUmAmCmCmA*SmU*SmU | CCAUU | SS |
| WV-49592 | mU*fG*mAn001fCmAfUmGmAmGmGn001fUmUm | UGACAUGAGGUUUUGAUA | XXnXOOOOOOnXOOOOOOOOO |
| | UfUmGfAmUmAmCmCmA*mU*mU | CCAUU | OXX |
| WV-49593 | mU*fG*mAfCmAfUmGmAmGmGfUmUmUfUmGfA | UGACAUGAGGUUUUGAUA | XXOOOOOOOOOOOOOOOOOO |
| | mUmAmCmCmA*mU*mU | CCAUU | XX |
| WV-49614 | mU*SfC*RmCn001SfUmUfCmCmCmUmGn001RfAm | UCCUUCCCUGAAGGUUCCUCC | SRnSOOOOOOnROOOOOOOOO |
| | AmGfGmUfUmCmCmUmCmC*SmU*SmU | | OSS |
| WV-49615 | Mod0011001mG*SmGmAmGmGmAfAmCfCfUfUmCm | GGAGGAACCUUCAGGGAAGGA | OSOOOOOOOOOOOOOOOOOOS |
| | AmGmGmGmAmAmGmG*SmA | | |

### Notes:

[0368] Description, Base Sequence and Stereochemistry/Linkage, due to their length, may be divided into multiple lines in Table 1. Unless otherwise specified, all oligonucleotides in Table 1 are single-stranded. As appreciated by those skilled in the art, nucleoside units are unmodified and contain unmodified nucleobases and 2′-deoxy sugars unless otherwise indicated (e.g., with r, m, etc.); linkages, unless otherwise indicated, are natural phosphate linkages; and acidic/basic groups may independently exist in their salt forms. If a sugar is not specified, the sugar is a natural DNA sugar; and if an internucleotidic linkage is not specified, the internucleotidic linkage is a natural phosphate linkage. Moieties and modifications:
[0369] m: 2′-OMe;
[0370] f: 2′-F;
[0371] O, PO: phosphodiester (phosphate). It can a linkage or be an end group (or a component thereof), e.g., a linkage between a linker and an oligonucleotide chain, an internucleotidic linkage (a natural phosphate linkage), etc. Phosphodiesters are typically indicated with “0” in the Stereochemistry/Linkage column and are typically not marked in the Description column (if it is an end group, e.g., a 5′-end group, it is indicated in the Description and typically not in Stereochemistry/Linkage); if no linkage is indicated in the Description column, it is typically a phosphodiester unless otherwise indicated. Note that a phosphate linkage between a linker (e.g., L001) and an oligonucleotide chain may not be marked in the Description column, but may be indicated with “0” in the Stereochemistry/Linkage column; *, PS: Phosphorothioate. It can be an end group (if it is an end group, e.g., a 5′-end group, it is indicated in the Description and typically not in Stereochemistry/Linkage), or a linkage, e.g., a linkage between linker (e.g., L001) and an oligonucleotide chain, an internucleotidic linkage (a phosphorothioate internucleotidic linkage), etc.;
[0372] R, Rp: Phosphorothioate in the Rp configuration. Note that * R in Description indicates a single phosphorothioate linkage in the Rp configuration;
[0373] S, Sp: Phosphorothioate in the Sp configuration. Note that * S in Description indicates a single phosphorothioate linkage in the Sp configuration;
[0374] X: stereorandom phosphorothioate;

[chemical structure]

[0375] nX: stereorandom n001;
[0376] nR or n001R: n001 in Rp configuration;
[0377] nS or n001S: n001 in Sp configuration;

[chemical structure]

[0378] nX: stereorandom n009;
[0379] nR or n009R: n009 in Rp configuration;
[0380] nS or n009S: n009 in S configuration;

[chemical structure]

[0381] nX: stereorandom n031;
[0382] nR or n031R: n031 in Rp configuration;
[0383] nS or n031S: n031 in Sp configuration;

[chemical structure]

[0384] nX: stereorandom n033;
[0385] nR or n033R: n033 in Rp configuration;
[0386] nS or n033S: n033 in Sp configuration

[chemical structure]

[0387] nX: stereorandom n037;
[0388] nR or n037R: n037 in Rp configuration;
[0389] nS or n037S: n037 in Sp configuration;

[chemical structure]

[0390] nX: stereorandom n046;
[0391] nR or n046R: n046 in Rp configuration;
[0392] nS or n046S: n046 in Sp configuration;

[chemical structure]

[0393] nX: stereorandom n047;
[0394] nR or n047R: n047 in Rp configuration;
[0395] nS or n047S: n047 in Sp configuration;

[chemical structure]

[0396] nX: stereorandom n025;
[0397] nR or n025R: n025 in Rp configuration;
[0398] nS or n025S: n025 in Sp configuration;

[chemical structure]

[0399] nX: stereorandom n054;
[0400] nR or n054R: n054 in Rp configuration;
[0401] nS or n054S: n054 in Sp configuration;

[chemical structure]

[0402] nX: stereorandom n055;
[0403] nR or n055R: n055 in Rp configuration;
[0404] nS or n055S: n055 in Sp configuration;

[chemical structure]

[0405] nX: stereorandom n001;
[0406] nR or n026R: n026 in Rp configuration;
[0407] nS or n026S: n026 in Sp configuration;

[chemical structure]

[0408] nX: stereorandom n004;
[0409] nR or n004R: n004 in Rp configuration;
[0410] nS or n004S: n004 in Sp configuration;

[chemical structure]

[0411] nX: stereorandom n003;
[0412] nR or n003R: n003 in Rp configuration;
[0413] nS or n003S: n003 in Sp configuration;

[chemical structure]

[0414] nX: stereorandom n008;
[0415] nR or n008R: n008 in Rp configuration;
[0416] nS or n008S: n008 in Sp configuration;

[chemical structure]

[0417] nX: stereorandom n029;
[0418] nR or n029R: n029 in Rp configuration;
[0419] nS or n029S: n029 in Sp configuration;

[chemical structure]

[0420] nX: stereorandom n021;
[0421] nR or n021R: n021 in Rp configuration;
[0422] nS or n021S: n021 in Sp configuration;

[chemical structure]

[0423] nX: stereorandom n006;
[0424] nR or n006R: n006 in Rp configuration;
[0425] nS or n006S: n006 in Sp configuration;

[chemical structure]

[0426] nX: stereorandom n020;
[0427] nR or n020R: n020 in Rp configuration;
[0428] nS or n020S: n020 in Sp configuration;
[0429] X: stereorandom phosphorothioate;

[chemical structure]

[chemical structure]

[chemical structure]

[chemical structure]

[chemical structure]

[chemical structure]

[chemical structure]

[chemical structure]

[chemical structure]

wherein —C(O)— is bonded to nitrogen;

[chemical structure]

i.e. morpholine carbamate internucleotidic linkages (sm01n013)

[chemical structure]

[chemical structure]

[0430] L001: —NH—(CH₂)₆— linker (C6 linker, C6 amine linker or C6 amino linker), connected to Mod (e.g., Mod001) through —NH—, and, in the case of, for example, WV-38061, the 5′-end of the oligonucleotide chain through a phosphate linkage (O or PO). For example, in WV-38061, L001 is connected to Mod001 through —NH— (forming an amide group —C(O)—NH—), and is connected to the oligonucleotide chain through a phosphate linkage (O).

[chemical structure]

[0431] In some embodiments, when L010 is present in the middle of an oligonucleotide, it is bonded to internucleotidic linkages as other sugars (e.g., DNA sugars), e.g., its 5′-carbon is connected to another unit (e.g., 3′ of a sugar) and its 3′-carbon is connected to another unit (e.g., a 5′-carbon of a carbon) independently, e.g., via a linkage (e.g., a phosphate linkage (O or PO) or a phosphorothioate linkage (can be either not chirally controlled or chirally controlled (Sp or Rp)));
[0432] L012:—CH₂CH₂OCH₂CH₂OCH₂CH₂—. When L012 is present in the middle of an oligonucleotide, each of its two ends is independently bonded to an internucleotidic linkage (e.g., a phosphate linkage (O or PO) or a phosphorothioate linkage (can be either not chirally controlled or chirally controlled (Sp or Rp)));

[chemical structure]

wherein L022 is connected to the rest of a molecule through a phosphate unless indicated otherwise;
[0433] L023: HO—(CH₂)₆—, wherein CH₂ is connected to the rest of a molecule through a phosphate unless indicated otherwise. For example, in WV-42644 (wherein the O in OnRnRnRnRSSSSSSSSSSSSSSSSSSnRSSSSSnRSSnR indicates a phosphate linkage connecting L023 to the rest of the molecule);

[chemical structure]

wherein the —CH₂— connection site is utilized as a C5 connection site of a sugar (e.g., a DNA sugar) and is connected to another unit (e.g., 3′ of a sugar), and the connection site on the ring is utilized as a C3 connection site and is connected to another unit (e.g., a 5′-carbon of a carbon), each of which is independently, e.g., via a linkage (e.g., a phosphate linkage (O or PO) or a phosphorothioate linkage (can be either not chirally controlled or chirally controlled (Sp or Rp))). When L025 is at a 5′-end without any modifications, its —CH₂— connection site is bonded to —OH. For example, L025L025L025—in various oligonucleotides has the structure of

[chemical structure]

(may exist as various salt forms) and is connected to 5′-carbon of an oligonucleotide chain via a linkage as indicated (e.g., a phosphate linkage (O or PO) or a phosphorothioate linkage (can be either not chirally controlled or chirally controlled (Sp or Rp)));
[0434] L016:

[chemical structure]

wherein L016 is connected to the rest of a molecule through a phosphate unless indicated otherwise; L016 is utilized with n001 to form L016n001, which has the structure of

[chemical structure]

### Double Stranded Oligonucleotide Lengths

[0435] As appreciated by those skilled in the art, ds oligonucleotides targeting HSD17B13 can be of various lengths to provide desired properties and/or activities for various uses. Many technologies for assessing, selecting and/or optimizing oligonucleotide length are available in the art and can be utilized in accordance with the present disclosure. As demonstrated herein, in many embodiments, ds oligonucleotides targeting HSD17B13 are of suitable lengths to hybridize with their targets and reduce levels of their targets and/or an encoded product thereof. In some embodiments, an oligonucleotide is long enough to recognize a target nucleic acid (e.g., a HSD17B13 mRNA). In some embodiments, an oligonucleotide is sufficiently long to distinguish between a target nucleic acid and other nucleic acids (e.g., a nucleic acid having a base sequence which is not HSD17B13) to reduce off-target effects. In some embodiments, a ds oligonucleotide targeting HSD17B13 is sufficiently short to reduce complexity of manufacture or production and to reduce cost of products.

[0436] In some embodiments, the base sequence of an oligonucleotide is about 10-500 nucleobases in length. In some embodiments, a base sequence is about 10-500 nucleobases in length. In some embodiments, a base sequence is about 10-50 nucleobases in length. In some embodiments, a base sequence is about 15-50 nucleobases in length. In some embodiments, a base sequence is from about 15 to about 30 nucleobases in length. In some embodiments, a base sequence is from about 10 to about 25 nucleobases in length. In some embodiments, a base sequence is from about 15 to about 22 nucleobases in length. In some embodiments, a base sequence is about 10, 11, 12, 13, 14, 15, 16, 17, 18, 19, 20, 21, 22, 23, 24, or 25 nucleobases in length. In some embodiments, a base sequence is about 18 nucleobases in length. In some embodiments, a base sequence is about 19 nucleobases in length. In some embodiments, a base sequence is about 20 nucleobases in length. In some embodiments, a base sequence is about 21 nucleobases in length. In some embodiments, a base sequence is about 22 nucleobases in length. In some embodiments, a base sequence is about 23 nucleobases in length. In some embodiments, a base sequence is about 24 nucleobases in length. In some embodiments, a base sequence is about 25 nucleobases in length. In some embodiments, each nucleobase is optionally substituted A, T, C, G, U, or an optionally substituted tautomer of A, T, C, G, or U.

### Double Stranded Oligonucleotide Internucleotidic Linkages

[0437] In some embodiments, ds oligonucleotides targeting HSD17B13 comprise base modifications, sugar modifications, and/or internucleotidic linkage modifications. Various internucleotidic linkages can be utilized in accordance with the present disclosure to link units comprising nucleobases, e.g., nucleosides. In some embodiments, ds oligonucleotides targeting HSD17B13 comprise both one or more modified internucleotidic linkages and one or more natural phosphate linkages. As widely known by those skilled in the art, natural phosphate linkages are widely found in natural DNA and RNA molecules; they have the structure of —OP(O)(OH)O—, connect sugars in the nucleosides in DNA and RNA, and may be in various salt forms, for example, at physiological pH (about 7.4), natural phosphate linkages are predominantly exist in salt forms with the anion being —OP(O)(O⁻)O—. A modified internucleotidic linkage, or a non-natural phosphate linkage, is an internucleotidic linkage that is not natural phosphate linkage or a salt form thereof. Modified internucleotidic linkages, depending on their structures, may also be in their salt forms. For example, as appreciated by those skilled in the art, phosphorothioate internucleotidic linkages which have the structure of —OP(O)(SH)O— may be in various salt forms, e.g., at physiological pH (about 7.4) with the anion being —OP(O)(S⁻)O—.

[0438] In some embodiments, an oligonucleotide comprises an internucleotidic linkage which is a modified internucleotidic linkage, e.g., phosphorothioate, phosphorodithioate, methylphosphonate, phosphoroamidate, thiophosphate, 3′-thiophosphate, or 5′-thiophosphate. In some embodiments, a modified internucleotidic linkage is a chiral internucleotidic linkage which comprises a chiral linkage phosphorus. In some embodiments, a chiral internucleotidic linkage is a phosphorothioate linkage. In some embodiments, a chiral internucleotidic linkage is a non-negatively charged internucleotidic linkage. In some embodiments, a chiral internucleotidic linkage is a neutral internucleotidic linkage. In some embodiments, a chiral internucleotidic linkage is chirally controlled with respect to its chiral linkage phosphorus. In some embodiments, a chiral internucleotidic linkage is stereochemically pure with respect to its chiral linkage phosphorus. In some embodiments, a chiral internucleotidic linkage is not chirally controlled. In some embodiments, a pattern of backbone chiral centers comprises or consists of positions and linkage phosphorus configurations of chirally controlled internucleotidic linkages (Rp or Sp) and positions of achiral internucleotidic linkages (e.g., natural phosphate linkages).

[0439] In certain embodiments, an internucleotidic linkage comprises a P-modification, wherein a P-modification is a modification at a linkage phosphorus. In certain embodiments, a modified internucleotidic linkage is a moiety which does not comprise a phosphorus but serves to link two sugars or two moieties that each independently comprises a nucleobase, e.g., as in peptide nucleic acid (PNA).

[0440] In certain embodiments, a ds oligonucleotide comprises a modified internucleotidic linkage, e.g., those having the structure of Formula I, I-a, I-b, or I-c and described herein and/or in: WO 2018/022473, WO 2018/098264, WO 2018/223056, WO 2018/223073, WO 2018/223081, WO 2018/237194, WO 2019/032607, WO 2019/055951, WO 2019/075357, WO 2019/200185, WO 2019/217784, and/or WO 2019/032612, the internucleotidic linkages (e.g., those of Formula I, I-a, I-b, I-c, etc.) of each of which are independently incorporated herein by reference. In certain embodiments, a modified internucleotidic linkage is a chiral internucleotidic linkage. In certain embodiments, a modified internucleotidic linkage is a phosphorothioate internucleotidic linkage.

[0441] In certain embodiments, a modified internucleotidic linkage is anon-negatively charged internucleotidic linkage. In certain embodiments, provided ds oligonucleotides comprise one or more non-negatively charged internucleotidic linkages. In certain embodiments, a non-negatively charged internucleotidic linkage is a positively charged internucleotidic linkage. In certain embodiments, a non-negatively charged internucleotidic linkage is a neutral internucleotidic linkage. In certain embodiments, the present disclosure provides ds oligonucleotides comprising one or more neutral internucleotidic linkages. In certain embodiments, a non-negatively charged internucleotidic linkage has the structure of Formula I-n-1, I-n-2, I-n-3, I-n-4, II, II-a-1, II-a-2, II-b-1, II-b-2, II-c-1, II-c-2, II-d-1, II-d-2, etc., or a salt form thereof, as described herein and/or in U.S. Pat. Nos. 9,394,333, 9,744,183, 9,605,019, 9,982,257, US 20170037399, US 20180216108, US 20180216107, U.S. Pat. No. 9,598,458, WO 2017/062862, WO 2018/067973, WO 2017/160741, WO 2017/192679, WO 2017/210647, WO 2018/098264, WO 2018/022473, WO 2018/223056, WO 2018/223073, WO 2018/223081, WO 2018/237194, WO 2019/032607, WO2019/032612, WO 2019/055951, WO 2019/075357, WO 2019/200185, WO 2019/217784, and/or WO 2019/032612, the non-negatively charged internucleotidic linkages (e.g., those of Formula I-n-1, I-n-2, I-n-3, I-n-4, II, II-a-1, II-a-2, II-b-1, II-b-2, II-c-1, II-c-2, II-d-1, II-d-2, etc., or a suitable salt form thereof) of each of which are independently incorporated herein by reference.

[0442] In certain embodiments, a non-negatively charged internucleotidic linkage can improve the delivery and/or activities (e.g., adenosine editing activity).

[0443] In certain embodiments, a modified internucleotidic linkage (e.g., a non-negatively charged internucleotidic linkage) comprises optionally substituted triazolyl. In certain embodiments, a modified internucleotidic linkage (e.g., a non-negatively charged internucleotidic linkage) comprises optionally substituted alkynyl. In certain embodiments, a modified internucleotidic linkage comprises a triazole or alkyne moiety. In certain embodiments, a triazole moiety, e.g., a triazolyl group, is optionally substituted. In certain embodiments, a triazole moiety, e.g., a triazolyl group) is substituted. In certain embodiments, a triazole moiety is unsubstituted. In certain embodiments, a modified internucleotidic linkage comprises an optionally substituted cyclic guanidine moiety. In certain embodiments, a modified internucleotidic linkage has the structure of

[chemical structure]

and is optionally chirally controlled, wherein R¹ is -L-R′, wherein L is L^{B} as described herein, and R′ is as described herein. In certain embodiments, each R¹ is independently R′. In certain embodiments, each R′ is independently R. In certain embodiments, two R¹ are R and are taken together to form a ring as described herein. In certain embodiments, two R¹ on two different nitrogen atoms are R and are taken together to form a ring as described herein. In certain embodiments, R¹ is independently optionally substituted C₁₋₆ aliphatic as described herein. In certain embodiments, R¹ is methyl. In certain embodiments, two R′ on the same nitrogen atom are R and are taken together to form a ring as described herein. In certain embodiments, a modified internucleotidic linkage has the structure of

[chemical structure]

and is optionally chirally controlled. In certain embodiments,

[chemical structure]

In certain embodiments, a modified internucleotidic linkage comprises an optionally substituted cyclic guanidine moiety and has the structure of:

[chemical structure]

wherein W is O or S. In certain embodiments, W is O. In certain embodiments, W is S. In certain embodiments, a non-negatively charged internucleotidic linkage is stereochemically controlled.

[0444] In certain embodiments, a non-negatively charged internucleotidic linkage or a neutral internucleotidic linkage is an internucleotidic linkage comprising a triazole moiety. In some embodiments, an internucleotidic linkage comprising a triazole moiety (e.g., an optionally substituted triazolyl group) has the structure of

[chemical structure]

In some embodiments, an internucleotidic linkage comprising a triazole moiety has the structure of

[chemical structure]

In some embodiments, an internucleotidic linkage comprising a triazole moiety has the formula of

[chemical structure]

where W is O or S. In some embodiments, an internucleotidic linkage comprising an alkyne moiety (e.g., an optionally substituted alkynyl group) has the formula of

[chemical structure]

wherein W is O or S. In some embodiments, an internucleotidic linkage, e.g., a non-negatively charged internucleotidic linkage, a neutral internucleotidic linkage, comprises a cyclic guanidine moiety. In some embodiments, an internucleotidic linkage comprising a cyclic guanidine moiety has the structure of

[chemical structure]

In some embodiments, a non-negatively charged internucleotidic linkage, or a neutral internucleotidic linkage, is or comprising a structure selected from

[chemical structure]

wherein W is O or S. In certain embodiments, an internucleotidic linkage, e.g., a non-negatively charged internucleotidic linkage, a neutral internucleotidic linkage, comprises a cyclic guanidine moiety. In certain embodiments, an internucleotidic linkage comprising a cyclic guanidine moiety has the structure of

[chemical structure]

In certain embodiments, a non-negatively charged internucleotidic linkage, or a neutral internucleotidic linkage, is or comprising a structure

[chemical structure]

wherein W is O or S.

[0445] In certain embodiments, an internucleotidic linkage comprises a Tmg group (

[chemical structure]

In certain embodiments, an internucleotidic linkage comprises a Tmg group and has the structure of

[chemical structure]

(the “Tmg internucleotidic linkage”). In certain embodiments, neutral internucleotidic linkages include internucleotidic linkages of PNA and PMO, and a Tmg internucleotidic linkage.

[0446] In certain embodiments, a non-negatively charged internucleotidic linkage has the structure of Formula I, I-a, I-b, I-c, I-n-1, I-n-2, I-n-3, I-n-4, II, II-a-1, II-a-2, II-b-1, II-b-2, II-c-1, II-c-2, II-d-1, II-d-2, etc., or a salt form thereof. In certain embodiments, a non-negatively charged internucleotidic linkage comprises an optionally substituted 3-20 membered heterocyclyl or heteroaryl group having 1-10 heteroatoms. In certain embodiments, a non-negatively charged internucleotidic linkage comprises an optionally substituted 3-20 membered heterocyclyl or heteroaryl group having 1-10 heteroatoms, wherein at least one heteroatom is nitrogen. In certain embodiments, such a heterocyclyl or heteroaryl group is of a 5-membered ring. In certain embodiments, such a heterocyclyl or heteroaryl group is of a 6-membered ring.

[0447] In certain embodiments, a non-negatively charged internucleotidic linkage comprises an optionally substituted 5-20 membered heteroaryl group having 1-10 heteroatoms. In certain embodiments, a non-negatively charged internucleotidic linkage comprises an optionally substituted 5-20 membered heteroaryl group having 1-10 heteroatoms, wherein at least one heteroatom is nitrogen. In certain embodiments, a non-negatively charged internucleotidic linkage comprises an optionally substituted 5-6 membered heteroaryl group having 1-4 heteroatoms, wherein at least one heteroatom is nitrogen. In certain embodiments, a non-negatively charged internucleotidic linkage comprises an optionally substituted 5-membered heteroaryl group having 1-4 heteroatoms, wherein at least one heteroatom is nitrogen. In certain embodiments, a heteroaryl group is directly bonded to a linkage phosphorus.

[0448] In certain embodiments, a non-negatively charged internucleotidic linkage comprises an optionally substituted 5-20 membered heterocyclyl group having 1-10 heteroatoms. In certain embodiments, a non-negatively charged internucleotidic linkage comprises an optionally substituted 5-20 membered heterocyclyl group having 1-10 heteroatoms, wherein at least one heteroatom is nitrogen. In certain embodiments, a non-negatively charged internucleotidic linkage comprises an optionally substituted 5-6 membered heterocyclyl group having 1-4 heteroatoms, wherein at least one heteroatom is nitrogen. In certain embodiments, a non-negatively charged internucleotidic linkage comprises an optionally substituted 5-membered heterocyclyl group having 1-4 heteroatoms, wherein at least one heteroatom is nitrogen. In certain embodiments, at least two heteroatoms are nitrogen. In some embodiments, a non-negatively charged internucleotidic linkage comprises an optionally substituted triazolyl group. In some embodiments, a non-negatively charged internucleotidic linkage comprises an unsubstituted triazolyl group, e.g.,

[chemical structure]

In some embodiments, a non-negatively charged internucleotidic linkage comprises a substituted triazolyl group, e.g.,

[chemical structure]

[0449] In certain embodiments, a heterocyclyl group is directly bonded to a linkage phosphorus. In certain embodiments, a heterocyclyl group is bonded to a linkage phosphorus through a linker, e.g., ═N— when the heterocyclyl group is part of a guanidine moiety who directed bonded to a linkage phosphorus through its ═N—. In certain embodiments, a non-negatively charged internucleotidic linkage comprises an optionally substituted

[chemical structure]

group. In certain embodiments, a non-negatively charged internucleotidic linkage comprises an substituted

[chemical structure]

group. In certain embodiments, a non-negatively charged internucleotidic linkage comprises a

[chemical structure]

group, wherein each R¹ is independently -L-R. In certain embodiments, each R¹ is independently optionally substituted C₁₋₆ alkyl. In certain embodiments, each R¹ is independently methyl.

[0450] In certain embodiments, a modified internucleotidic linkage, e.g., a non-negatively charged internucleotidic linkage, comprises a triazole or alkyne moiety, each of which is optionally substituted. In certain embodiments, a modified internucleotidic linkage comprises a triazole moiety. In certain embodiments, a modified internucleotidic linkage comprises a unsubstituted triazole moiety. In certain embodiments, a modified internucleotidic linkage comprises a substituted triazole moiety. In certain embodiments, a modified internucleotidic linkage comprises an alkyl moiety. In certain embodiments, a modified internucleotidic linkage comprises an optionally substituted alkynyl group. In certain embodiments, a modified internucleotidic linkage comprises an unsubstituted alkynyl group. In certain embodiments, a modified internucleotidic linkage comprises a substituted alkynyl group. In certain embodiments, an alkynyl group is directly bonded to a linkage phosphorus.

[0451] In certain embodiments, a ds oligonucleotide comprises different types of internucleotidic phosphorus linkages. In certain embodiments, a chirally controlled oligonucleotide comprises at least one natural phosphate linkage and at least one modified (non-natural) internucleotidic linkage. In certain embodiments, a ds oligonucleotide comprises at least one natural phosphate linkage and at least one phosphorothioate. In certain embodiments, a ds oligonucleotide comprises at least one non-negatively charged internucleotidic linkage. In certain embodiments, a ds oligonucleotide comprises at least one natural phosphate linkage and at least one non-negatively charged internucleotidic linkage. In certain embodiments, a ds oligonucleotide comprises at least one phosphorothioate internucleotidic linkage and at least one non-negatively charged internucleotidic linkage. In certain embodiments, a ds oligonucleotide comprises at least one phosphorothioate internucleotidic linkage, at least one natural phosphate linkage, and at least one non-negatively charged internucleotidic linkage. In certain embodiments, ds oligonucleotides comprise one or more, e.g., 1-50, 1-40, 1-30, 1-20, 1-15, 1-10, 1, 2, 3, 4, 5, 6, 7, 8, 9, 10, 11, 12, 13, 14, 15, 16, 17, 18, 19, 20 or more non-negatively charged internucleotidic linkages. In certain embodiments, a non-negatively charged internucleotidic linkage is not negatively charged in that at a given pH in an aqueous solution less than 50%, 40%, 40%, 30%, 20%, 10%, 5%, or 1% of the internucleotidic linkage exists in a negatively charged salt form. In certain embodiments, a pH is about pH 7.4. In certain embodiments, a pH is about 4-9. In certain embodiments, the percentage is less than 10%. In certain embodiments, the percentage is less than 5%. In certain embodiments, the percentage is less than 1%. In certain embodiments, an internucleotidic linkage is a non-negatively charged internucleotidic linkage in that the neutral form of the internucleotidic linkage has no pKa that is no more than about 1, 2, 3, 4, 5, 6, or 7 in water. In certain embodiments, no pKa is 7 or less. In certain embodiments, no pKa is 6 or less. In certain embodiments, no pKa is 5 or less. In certain embodiments, no pKa is 4 or less. In certain embodiments, no pKa is 3 or less. In certain embodiments, no pKa is 2 or less. In certain embodiments, no pKa is 1 or less. In certain embodiments, pKa of the neutral form of an internucleotidic linkage can be represented by pKa of the neutral form of a compound having the structure of CH₃— the internucleotidic linkage —CH₃. For example, pKa of the neutral form of an internucleotidic linkage having the structure of Formula I may be represented by the pKa of the neutral form of a compound having the structure of

[chemical structure]

(wherein each of X, Y, Z is independently —O—, —S—, —N(R′)—; L is L^{B}, and R¹ is -L-R′), pKa of

[chemical structure]

can be represented by pKa

[chemical structure]

In certain embodiments, a non-negatively charged internucleotidic linkage is a neutral internucleotidic linkage. In certain embodiments, a non-negatively charged internucleotidic linkage is a positively-charged internucleotidic linkage. In certain embodiments, a non-negatively charged internucleotidic linkage comprises a guanidine moiety. In certain embodiments, a non-negatively charged internucleotidic linkage comprises a heteroaryl base moiety. In certain embodiments, a non-negatively charged internucleotidic linkage comprises a triazole moiety. In certain embodiments, a non-negatively charged internucleotidic linkage comprises an alkynyl moiety.

[0452] In certain embodiments, a neutral or non-negatively charged internucleotidic linkage has the structure of any neutral or non-negatively charged internucleotidic linkage described in any of: U.S. Pat. Nos. 9,394,333, 9,744,183, 9,605,019, 9,982,257, US 20170037399, US 20180216108, US 20180216107, U.S. Pat. No. 9,598,458, WO 2017/062862, WO 2018/067973, WO 2017/160741, WO 2017/192679, WO 2017/210647, WO 2018/098264, WO 2018/022473, WO 2018/223056, WO 2018/223073, WO 2018/223081, WO 2018/237194, WO 2019/032607, WO2019/032612, WO 2019/055951, WO 2019/075357, WO 2019/200185, WO 2019/217784, and/or WO 2019/032612,2607, WO2019032612, WO 2019/055951, WO 2019/075357, WO 2019/200185, WO 2019/217784, and/or WO 2019/032612, each neutral or non-negatively charged internucleotidic linkage of each of which is hereby incorporated by reference.

[0453] In certain embodiments, each R′ is independently optionally substituted C₁₋₆ aliphatic. In certain embodiments, each R′ is independently optionally substituted C₁₋₆ alkyl. In certain embodiments, each R′ is independently —CH₃. In certain embodiments, each R^{s} is —H.

[0454] In certain embodiments, a non-negatively charged internucleotidic linkage has the structure of

[chemical structure]

In certain embodiments, a non-negatively charged internucleotidic linkage has the structure of

[chemical structure]

In certain embodiments, a non-negatively charged internucleotidic linkage has the structure of

[chemical structure]

In some embodiments, a non-negatively charged internucleotidic linkage has the structure of

[chemical structure]

In some embodiments, a non-negatively charged internucleotidic linkage has the structure of

[chemical structure]

In some embodiments, a non-negatively charged internucleotidic linkage has the structure of

[chemical structure]

In some embodiments, a non-negatively charged internucleotidic linkage has the structure of

[chemical structure]

In some embodiments, a non-negatively charged internucleotidic linkage has the structure of

[chemical structure]

In some embodiments, anon-negatively charged internucleotidic linkage has the structure of

[chemical structure]

In some embodiments, a non-negatively charged internucleotidic linkage has the structure of

[chemical structure]

In some embodiments, a non-negatively charged internucleotidic linkage has the structure of

[chemical structure]

In some embodiments, a non-negatively charged internucleotidic linkage has the structure of

[chemical structure]

In some embodiments, W is O. In some embodiments, W is S. In some embodiments, a neutral internucleotidic linkage is a non-negatively charged internucleotidic linkage described above.

[0455] In certain embodiments, provided ds oligonucleotides comprise 1 or more internucleotidic linkages of Formula I, I-a, I-b, I-c, I-n-1, I-n-2, I-n-3, I-n-4, II, II-a-1, II-a-2, II-b-1, II-b-2, II-c-1, II-c-2, II-d-1, or II-d-2, which are described in U.S. Pat. Nos. 9,394,333, 9,744,183, 9,605,019, 9,982,257, US 20170037399, US 20180216108, US 20180216107, U.S. Pat. No. 9,598,458, WO 2017/062862, WO 2018/067973, WO 2017/160741, WO 2017/192679, WO 2017/210647, WO 2018/098264, WO 2018/022473, WO 2018/223056, WO 2018/223073, WO 2018/223081, WO 2018/237194, WO 2019/032607, WO2019/032612, WO 2019/055951, WO 2019/075357, WO 2019/200185, WO 2019/217784, and/or WO 2019/032612,2607, WO2019032612, WO 2019/055951, WO 2019/075357, WO 2019/200185, WO 2019/217784, and/or WO 2019/032612, the Formula I, I-a, I-b, I-c, I-n-1, I-n-2, I-n-3, I-n-4, II, II-a-1, II-a-2, II-b-1, II-b-2, II-c-1, II-c-2, II-d-1, or II-d-2, or salt forms thereof, each of which are independently incorporated herein by reference.

[0456] In certain embodiments, a ds oligonucleotide comprises a neutral internucleotidic linkage and a chirally controlled internucleotidic linkage. In certain embodiments, a ds oligonucleotide comprises a neutral internucleotidic linkage and a chirally controlled internucleotidic linkage which is not the neutral internucleotidic linkage. In certain embodiments, a ds oligonucleotide comprises a neutral internucleotidic linkage and a chirally controlled phosphorothioate internucleotidic linkage. In certain embodiments, the present disclosure provides a ds oligonucleotide comprising one or more non-negatively charged internucleotidic linkages and one or more phosphorothioate internucleotidic linkages, wherein each phosphorothioate internucleotidic linkage in the oligonucleotide is independently a chirally controlled internucleotidic linkage. In certain embodiments, the present disclosure provides a ds oligonucleotide comprising one or more neutral internucleotidic linkages and one or more phosphorothioate internucleotidic linkage, wherein each phosphorothioate internucleotidic linkage in the ds oligonucleotide is independently a chirally controlled internucleotidic linkage. In certain embodiments, a ds oligonucleotide comprises at least 5, 6, 7, 8, 9, 10, 11, 12, 13, 14, 15, 16, 17, 18, 19, 20 or more chirally controlled phosphorothioate internucleotidic linkages. In certain embodiments, non-negatively charged internucleotidic linkage is chirally controlled. In certain embodiments, non-negatively charged internucleotidic linkage is not chirally controlled. In certain embodiments, a neutral internucleotidic linkage is chirally controlled. In certain embodiments, a neutral internucleotidic linkage is not chirally controlled.

[0457] Without wishing to be bound by any particular theory, the present disclosure notes that a neutral internucleotidic linkage can be more hydrophobic than a phosphorothioate internucleotidic linkage (PS), which can be more hydrophobic than a natural phosphate linkage (PO). Typically, unlike a PS or PO, a neutral internucleotidic linkage bears less charge. Without wishing to be bound by any particular theory, the present disclosure notes that incorporation of one or more neutral internucleotidic linkages into a ds oligonucleotide may increase the ds oligonucleotides' ability to be taken up by a cell and/or to escape from endosomes. Without wishing to be bound by any particular theory, the present disclosure notes that incorporation of one or more neutral internucleotidic linkages can be utilized to modulate melting temperature of duplexes formed between a ds oligonucleotide and its target nucleic acid.

[0458] Without wishing to be bound by any particular theory, the present disclosure notes that incorporation of one or more non-negatively charged internucleotidic linkages, e.g., neutral internucleotidic linkages, into a ds oligonucleotide may be able to increase the ds oligonucleotide's ability to mediate a function such as target adenosine editing.

[0459] As appreciated by those skilled in the art, internucleotidic linkages such as natural phosphate linkages and those of Formula I, I-a, I-b, I-c, I-n-1, I-n-2, I-n-3, I-n-4, II, II-a-1, II-a-2, II-b-1, II-b-2, II-c-1, II-c-2, II-d-1, II-d-2, or salt forms thereof typically connect two nucleosides (which can either be natural or modified) as described in U.S. Pat. Nos. 9,394,333, 9,744,183, 9,605,019, 9,982,257, US 20170037399, US 20180216108, US 20180216107, U.S. Pat. No. 9,598,458, WO 2017/062862, WO 2018/067973, WO 2017/160741, WO 2017/192679, WO 2017/210647, WO 2018/098264, WO 2018/022473, WO 2018/223056, WO 2018/223073, WO 2018/223081, WO 2018/237194, WO 2019/032607, WO2019032612, WO 2019/055951, WO 2019/075357, WO 2019/200185, WO 2019/217784, and/or WO 2019/032612, the Formula I, I-a, I-b, I-c, I-n-1, I-n-2, I-n-3, I-n-4, II, II-a-1, II-a-2, II-b-1, II-b-2, II-c-1, II-c-2, II-d-1, II-d-2, or salt forms thereof, each of which are independently incorporated herein by reference. A typical connection, as in natural DNA and RNA, is that an internucleotidic linkage forms bonds with two sugars (which can be either unmodified or modified as described herein). In many embodiments, as exemplified herein an internucleotidic linkage forms bonds through its oxygen atoms or heteroatoms (e.g., Y and Z in various formulae) with one optionally modified ribose or deoxyribose at its 5′ carbon, and the other optionally modified ribose or deoxyribose at its 3′ carbon. In certain embodiments, each nucleoside units connected by an internucleotidic linkage independently comprises a nucleobase which is independently an optionally substituted A, T, C, G, or U, or a substituted tautomer of A, T, C, G or U, or a nucleobase comprising an optionally substituted heterocyclyl and/or a heteroaryl ring having at least one nitrogen atom.

[0460] In some embodiments, a linkage has the structure of or comprises Y—P^{L}(—X—R^{L})—Z—, or a salt form thereof, wherein:
[0461] P^{L} is P, P(═W), P->B(-L^{L}-R^{L})₃, or P^{N};
[0462] W is O, N(-L^{L}-R^{L}), S or Se;
[0463] P^{N} is P═N—C(-L^{L}-R′)(=L^{N}-R′) or P═N-L^{L}-R^{L};
[0464] L^{N} is ═N-L^{L1}-, ═CH-L^{L1}- wherein CH is optionally substituted, or ═N*(R′)(Q⁻)-L^{L1}-;
[0465] Q⁻ is an anion;
[0466] each of X, Y and Z is independently —O—, —S—, -L^{L}-N(-L^{L}-R^{L})-L^{L}-, -L^{L}-N═C(-L^{L}-R^{L})-L^{L}-, or L^{L};
[0467] each R^{L} is independently -L^{L}-N(R′)₂, -L^{L}-R′, —N═C(-L^{L}-R′)₂, -L^{L}-N(R′)C(NR′)N(R′)₂, -L^{L}-N(R′)C(O)N(R′)₂, a carbohydrate, or one or more additional chemical moieties optionally connected through a linker;
[0468] each of L^{L1} and L^{L} is independently L;
[0469] —Cy^{IL}- is -Cy-;
[0470] each L is independently a covalent bond, or a bivalent, optionally substituted, linear or branched group selected from a C₁₋₃₀ aliphatic group and a C₁₋₃₀ heteroaliphatic group having 1-10 heteroatoms, wherein one or more methylene units are optionally and independently replaced by an optionally substituted group selected from C₁₋₆ alkylene, C₁₋₆ alkenylene, —C≡C—, a bivalent C₁-C₆ heteroaliphatic group having 1-5 heteroatoms, —C(R′)₂—, -Cy-, —O—, —S—, —S—S—, —N(R′)—, —C(O)—, —C(S)—, —C(NR′)—, —C(NR′)N(R′)—, —N(R′)C(NR′)N(R′)—, —C(O)N(R′)—, —N(R′)C(O)N(R′)—, —N(R′)C(O)O—, —S(O)—, —S(O)₂—, —S(O)₂N(R′)—, —C(O)S—, —C(O)O—, —P(O)(OR′)—, —P(O)(SR′)—, —P(O)(R′)—, —P(O)(NR′)—, —P(S)(OR′)—, —P(S)(SR′)—, —P(S)(R′)—, —P(S)(NR′)—, —P(R′)—, —P(OR′)—, —P(SR′)—, —P(NR′)—, —P(OR′)[B(R′)₃]—, —OP(O)(OR′)O—, —OP(O)(SR′)O—, —OP(O)(R′)O—, —OP(O)(NR′)O—, —OP(OR′)O—, —OP(SR′)O—, —OP(NR′)O—, —OP(R′)O—, —OP(OR′)[B(R′)₃]O—, and —[C(R′)₂C(R′)₂O]n-, wherein n is 1-50, and one or more nitrogen or carbon atoms are optionally and independently replaced with Cy^{L};
[0471] each -Cy- is independently an optionally substituted bivalent 3-30 membered, monocyclic, bicyclic or polycyclic ring having 0-10 heteroatoms;
[0472] each Cy^{L} is independently an optionally substituted trivalent or tetravalent, 3-30 membered, monocyclic, bicyclic or polycyclic ring having 0-10 heteroatoms;
[0473] each R′ is independently —R, —C(O)R, —C(O)N(R)₂, —C(O)OR, or —S(O)₂R;
[0474] each R is independently —H, or an optionally substituted group selected from C₁₋₃₀ aliphatic, C₁₋₃₀ heteroaliphatic having 1-10 heteroatoms, C₆₋₃₀ aryl, C₆₋₃₀ arylaliphatic, C₆₋₃₀ arylheteroaliphatic having 1-10 heteroatoms, 5-30 membered heteroaryl having 1-10 heteroatoms, and 3-30 membered heterocyclyl having 1-10 heteroatoms, or
[0475] two R groups are optionally and independently taken together to form a covalent bond, or:
[0476] two or more R groups on the same atom are optionally and independently taken together with the atom to form an optionally substituted, 3-30 membered, monocyclic, bicyclic or polycyclic ring having, in addition to the atom, 0-10 heteroatoms; or
[0477] two or more R groups on two or more atoms are optionally and independently taken together with their intervening atoms to form an optionally substituted, 3-30 membered, monocyclic, bicyclic or polycyclic ring having, in addition to the intervening atoms, 0-10 heteroatoms.

[0478] In some embodiments, an internucleotidic linkage has the structure of —O—P^{L}(—X—R^{L})—O—, wherein each variable is independently as described herein. In some embodiments, an internucleotidic linkage has the structure of —O—P(═W)—X—R^{L})—O—, wherein each variable is independently as described herein. In some embodiments, an internucleotidic linkage has the structure of —O—P(═W)[—N(-L^{L}-R^{L})—R^{L}]—O—, wherein each variable is independently as described herein. In some embodiments, an internucleotidic linkage has the structure of —O—P(═W)(—NH-L^{L}-R^{L})—O—, wherein each variable is independently as described herein. In some embodiments, an internucleotidic linkage has the structure of —O—P(═W)[—N(R′)₂]—O—, wherein each variable is independently as described herein. In some embodiments, an internucleotidic linkage has the structure of —O—P(═W)(—NHR′)—O—, wherein each variable is independently as described herein. In some embodiments, an internucleotidic linkage has the structure of —O—P(═W)(—NHSO₂R)—O—, wherein each variable is independently as described herein. In some embodiments, an internucleotidic linkage has the structure of —O—P(═W)[—N═C(-L^{L}-R′)₂]—O—, wherein each variable is independently as described herein. In some embodiments, an internucleotidic linkage has the structure of —O—P(═W)[—N═C[N(R′)₂]₂]—O—, wherein each variable is independently as described herein. In some embodiments, an internucleotidic linkage has the structure of —OP(═W)(—N═C(R″)₂)—O—, wherein each variable is independently as described herein. In some embodiments, an internucleotidic linkage has the structure of —OP(═W)(—N(R″)₂)—O—, wherein each variable is independently as described herein. In some embodiments, W is O. In some embodiments, W is S. In some embodiments, such an internucleotidic linkage is a non-negatively charged internucleotidic linkage. In some embodiments, such an internucleotidic linkage is a neutral internucleotidic linkage.

[0479] In some embodiments, an internucleotidic linkage has the structure of —P^{L}(—X—R^{L})—Z—, wherein each variable is independently as described herein. In some embodiments, an internucleotidic linkage has the structure of —P^{L}(—X—R^{L})O—, wherein each variable is independently as described herein. In some embodiments, an internucleotidic linkage has the structure of —P(═W)(—X—R^{L})—O—, wherein each variable is independently as described herein. In some embodiments, an internucleotidic linkage has the structure of —P(═W)[—N(-L^{L}-R^{L})—R^{L}]—O—, wherein each variable is independently as described herein. In some embodiments, an internucleotidic linkage has the structure of —P(═W)(—NH-L^{L}-R^{L})—O—, wherein each variable is independently as described herein. In some embodiments, an internucleotidic linkage has the structure of —P(═W)[—N(R′)₂]—O—, wherein each variable is independently as described herein. In some embodiments, an internucleotidic linkage has the structure of —P(═W)(—NHR′)—O—, wherein each variable is independently as described herein. In some embodiments, an internucleotidic linkage has the structure of —P(═W)(—NHSO₂R)—O—, wherein each variable is independently as described herein. In some embodiments, an internucleotidic linkage has the structure of —P(═W)[—N═C(-L^{L}-R′)₂]—O—, wherein each variable is independently as described herein. In some embodiments, an internucleotidic linkage has the structure of —P(═W)[—N═C[N(R′)₂]₂]—O—, wherein each variable is independently as described herein. In some embodiments, an internucleotidic linkage has the structure of —P(═W)(—N═C(R″)₂)—O—, wherein each variable is independently as described herein. In some embodiments, an internucleotidic linkage has the structure of —P(═W)(—N(R″)₂)—O—, wherein each variable is independently as described herein. In some embodiments, W is O. In some embodiments, W is S. In some embodiments, such an internucleotidic linkage is a non-negatively charged internucleotidic linkage. In some embodiments, such an internucleotidic linkage is a neutral internucleotidic linkage. In some embodiments, P of such an internucleotidic linkage is bonded to N of a sugar.

[0480] In some embodiments, a linkage is a phosphoryl guanidine internucleotidic linkage. In some embodiments, a linkage is a thio-phosphoryl guanidine internucleotidic linkage.

[0481] In some embodiments, one or more methylene units are optionally and independently replaced with a moiety as described herein. In some embodiments, L or L^{L} is or comprises —SO₂—. In some embodiments, L or L^{L} is or comprises —SO₂N(R′)—. In some embodiments, L or L^{L} is or comprises —C(O)—. In some embodiments, L or L^{L} is or comprises —C(O)O—. In some embodiments, L or L^{L} is or comprises —C(O)N(R′)—. In some embodiments, L or L^{L} is or comprises —P(═W)(R′)—. In some embodiments, L or L^{L} is or comprises —P(═O)(R′)—. In some embodiments, L or L^{L} is or comprises —P(═S)(R′)—. In some embodiments, L or L^{L} is or comprises —P(R′)—. In some embodiments, L or L^{L} is or comprises —P(═W)(OR′)—. In some embodiments, L or L^{L} is or comprises —P(═O)(OR′)—. In some embodiments, L or L^{L} is or comprises —P(═S)(OR′)—. In some embodiments, L or L^{L} is or comprises —P(OR′)—. In some embodiments, —X—R^{L} is —N(R′)SO₂R^{L}. In some embodiments, —X—R^{L} is —N(R′)C(O)R^{L}. In some embodiments, —X—R^{L} is —N(R′)P(═O)(R′)R^{L}. In some embodiments, a linkage, e.g., a non-negatively charged internucleotidic linkage or neutral internucleotidic linkage, has the structure of or comprises —P(═W)(—N═C(R″)₂)—, —P(═W)(—N(R′)SO₂R″)—, —P(═W)(—N(R′)C(O)R″)—, —P(═W)(—N(R)₂)—, —P(═W)(—N(R′)P(O)(R″)₂)—, —OP(═W)(—N═C(R″)₂)O—, —OP(═W)(—N(R′)SO₂R″)O—, —OP(═W)(—N(R′)C(O)R″)O—, —OP(═W)(—N(R″)₂)O—, —OP(═W)(—N(R′)P(O)(R″)₂)O—, —P(═W)(—N═C(R″)₂)O—, —P(═W)(—N(R′)SO₂R″)O—, —P(═W)(—N(R′)C(O)R″)O—, —P(═W)(—N(R″)₂)O—, or —P(═W)(—N(R′)P(O)(R″)₂)O—, or a salt form thereof, wherein:
[0482] W is O or S;
[0483] each R″ is independently R′, —OR′, —P(═W)(R′)₂, or —N(R′)₂;
[0484] each R′ is independently —R, —C(O)R, —C(O)N(R)₂, —C(O)OR, or —S(O)₂R;
[0485] each R is independently —H, or an optionally substituted group selected from C₁₋₃₀ aliphatic, C₁₋₃₀ heteroaliphatic having 1-10 heteroatoms, C₆₋₃₀ aryl, C₆₋₃₀ arylaliphatic, C₆₋₃₀ arylheteroaliphatic having 1-10 heteroatoms, 5-30 membered heteroaryl having 1-10 heteroatoms, and 3-30 membered heterocyclyl having 1-10 heteroatoms, or
[0486] two R groups are optionally and independently taken together to form a covalent bond, or:
[0487] two or more R groups on the same atom are optionally and independently taken together with the atom to form an optionally substituted, 3-30 membered, monocyclic, bicyclic or polycyclic ring having, in addition to the atom, 0-10 heteroatoms; or
[0488] two or more R groups on two or more atoms are optionally and independently taken together with their intervening atoms to form an optionally substituted, 3-30 membered, monocyclic, bicyclic or polycyclic ring having, in addition to the intervening atoms, 0-10 heteroatoms.

[0489] In some embodiments, W is 0. In some embodiments, an internucleotidic linkage has the structure of —P(═O)(—N═C(R″)₂)—, —P(═O)(—N(R′)SO₂R″)—, —P(═O)(—N(R′)C(O)R″)—, —P(═O)(—N(R″)₂)—, —P(═O)(—N(R′)P(O)(R″)₂)—, —OP(═O)(—N═C(R″)₂)O—, —OP(═O)(—N(R′)SO₂R″)O—, —OP(═O)(—N(R′)C(O)R″)O—, —OP(═O)(—N(R″)₂)O—, —OP(═O)(—N(R′)P(O)(R″)₂)O—, —P(═O)(—N═C(R″)₂)O—, —P(═O)(—N(R′)SO₂R″)O—, —P(═O)(—N(R′)C(O)R″)O—, —P(═O)(—N(R″)₂)O—, or —P(═O)(—N(R′)P(O)(R″)₂)O—, or a salt form thereof. In some embodiments, an internucleotidic linkage has the structure of —P(═O)(—N═C(R″)₂)— —P(═O)—N(R″)₂)—, —OP(═O)(—N═C(R″)₂)—O—, —OP(═O)(—N(R″)₂)—O—, —P(═O)(—N═C(R″)₂)—O— or —P(═O)(—N(R″)₂)—O— or a salt form thereof. In some embodiments, an internucleotidic linkage has the structure of —OP(═O)(—N═C(R″)₂)—O— or —OP(═O)(—N(R″)₂)—O—, or a salt form thereof. In some embodiments, an internucleotidic linkage has the structure of —OP(═O)(—N═C(R″)₂)—O—, or a salt form thereof. In some embodiments, an internucleotidic linkage has the structure of —OP(═O)(—N(R″)₂)—O—, or a salt form thereof. In some embodiments, an internucleotidic linkage has the structure of —OP(═O)(—N(R′)SO₂R″)O—, or a salt form thereof. In some embodiments, an internucleotidic linkage has the structure of —OP(═O)(—N(R′)C(O)R″)O—, or a salt form thereof. In some embodiments, an internucleotidic linkage has the structure of —OP(═O)(—N(R′)P(O)(R″)₂)O—, or a salt form thereof. In some embodiments, a internucleotidic linkage is n001.

[0490] In some embodiments, W is S. In some embodiments, an internucleotidic linkage has the structure of —P(═S)(—N═C(R″)₂)—, —P(═S)(—N(R′)SO₂R″)—, —P(═S)(—N(R′)C(O)R″)—, —P(═S)—N(R″)₂)—, —P(═S)(—N(R′)P(O)(R″)₂)—, —OP(═S)(—N═C(R″)₂)O—, —OP(═S)(—N(R′)SO₂R″)O—, —OP(═S)(—N(R′)C(O)R″)O—, —OP(═S)(—N(R″)₂)O—, —OP(═S)(—N(R′)P(O)(R″)₂)O—, —P(═S)(—N═C(R″)₂)O—, —P(═S)(—N(R′)SO₂R″)O—, —P(═S)(—N(R′)C(O)R″)O—, —P(═S)(—N(R″)₂)O—, or —P(═S)(—N(R′)P(O)(R″)₂)O—, or a salt form thereof. In some embodiments, an internucleotidic linkage has the structure of —P(═S)(—N═C(R″)₂)— —P(═S)(—N(R″)₂)—, —OP(═S)(—N═C(R″)₂)—O—, —OP(═S)(—N(R″)₂)—O—, —P(═S)(—N═C(R″)₂)—O— or —P(═S)(—N(R″)₂)—O— or a salt form thereof. In some embodiments, an internucleotidic linkage has the structure of —OP(═S)(—N═C(R″)₂)—O— or —OP(═S)(—N(R″)₂)—O—, or a salt form thereof. In some embodiments, an internucleotidic linkage has the structure of —OP(═S)(—N═C(R″)₂)—O—, or a salt form thereof. In some embodiments, an internucleotidic linkage has the structure of —OP(═S)(—N(R″)₂)—O—, or a salt form thereof. In some embodiments, an internucleotidic linkage has the structure of —OP(═S)(—N(R′)SO₂R″)O—, or a salt form thereof. In some embodiments, an internucleotidic linkage has the structure of —OP(═S)(—N(R′)C(O)R″)O—, or a salt form thereof. In some embodiments, an internucleotidic linkage has the structure of —OP(═S)(—N(R′)P(O)(R″)₂)O—, or a salt form thereof. In some embodiments, a internucleotidic linkage is *n001.

[0491] In some embodiments, an internucleotidic linkage has the structure of —P(═O)(—N(R′)SO₂R″)—, wherein R″ is as described herein. In some embodiments, an internucleotidic linkage has the structure of —P(═S)(—N(R′)SO₂R″)—, wherein R″ is as described herein. In some embodiments, an internucleotidic linkage has the structure of —P(═O)(—N(R′)SO₂R″)O—, wherein R″ is as described herein. In some embodiments, an internucleotidic linkage has the structure of —P(═S)(—N(R′)SO₂R″)O—, wherein R″ is as described herein. In some embodiments, an internucleotidic linkage has the structure of —OP(═O)(—N(R′)SO₂R″)O—, wherein R″ is as described herein. In some embodiments, an internucleotidic linkage has the structure of —OP(═S)(—N(R′)SO₂R″)O—, wherein R″ is as described herein. In some embodiments, R′, e.g., of —N(R′)—, is hydrogen or optionally substituted C₁₋₆ aliphatic. In some embodiments, R′ is C₁₋₆ alkyl. In some embodiments, R′ is hydrogen. In some embodiments, R″, e.g., in —SO₂R″, is R′ as described herein. In some embodiments, an internucleotidic linkage has the structure of —P(═O)(—NHSO₂R″)—, wherein R″ is as described herein. In some embodiments, an internucleotidic linkage has the structure of —P(═S)(—NHSO₂R″)—, wherein R″ is as described herein. In some embodiments, an internucleotidic linkage has the structure of —P(═O)(—NHSO₂R″)O—, wherein R″ is as described herein. In some embodiments, an internucleotidic linkage has the structure of —P(═S)(—NHSO₂R″)O—, wherein R″ is as described herein. In some embodiments, an internucleotidic linkage has the structure of —OP(═O)(—NHSO₂R″)O—, wherein R″ is as described herein. In some embodiments, an internucleotidic linkage has the structure of —OP(═S)(—NHSO₂R″)O—, wherein R″ is as described herein. In some embodiments, —X—R^{L} is —N(R′)SO₂R^{L}, wherein each of R′ and R^{L} is independently as described herein. In some embodiments, R^{L} is R″. In some embodiments, R^{L} is R′. In some embodiments, —X—R^{L} is —N(R′)SO₂R″, wherein R′ is as described herein. In some embodiments, —X—R^{L} is —N(R′)SO₂R′, wherein R′ is as described herein. In some embodiments, —X—R^{L} is —NHSO₂R′, wherein R′ is as described herein. In some embodiments, R′ is R as described herein. In some embodiments, R′ is optionally substituted C₁₋₆ aliphatic. In some embodiments, R′ is optionally substituted C₁₋₆ alkyl. In some embodiments, R′ is optionally substituted phenyl. In some embodiments, R′ is optionally substituted heteroaryl. In some embodiments, R″, e.g., in —SO₂R″, is R. In some embodiments, R is an optionally substituted group selected from C₁₋₆ aliphatic, aryl, heterocyclyl, and heteroaryl. In some embodiments, R is optionally substituted C₁₋₆ aliphatic. In some embodiments, R is optionally substituted C₁₋₆ alkyl. In some embodiments, R is optionally substituted C₁₋₆ alkenyl. In some embodiments, R is optionally substituted C₁₋₆ alkynyl. In some embodiments, R is optionally substituted methyl. In some embodiments, —X—R^{L} is —NHSO₂CH₃. In some embodiments, R is —CF₃. In some embodiments, R is methyl. In some embodiments, R is optionally substituted ethyl. In some embodiments, R is ethyl. In some embodiments, R is —CH₂CHF₂. In some embodiments, R is —CH₂CH₂OCH₃. In some embodiments, R is optionally substituted propyl. In some embodiments, R is optionally substituted butyl. In some embodiments, R is n-butyl. In some embodiments, R is —(CH₂)₆NH₂. In some embodiments, R is an optionally substituted linear C₂₋₂₀ aliphatic. In some embodiments, R is optionally substituted linear C₂₋₂₀ alkyl. In some embodiments, R is linear C₂₋₂₀ alkyl. In some embodiments, R is optionally substituted C₁, C₂, C₃, C₄, C₅, C₆, C₇, C₈, C₉, C₁₀, C₁₁, C₁₂, C₁₃, C₁₄, C₁₅, C₁₆, C₁₇, C₁₈, C₁₉, or C₂₀ aliphatic. In some embodiments, R is optionally substituted C₁, C₂, C₃, C₄, C₅, C₆, C₇, C₈, C₉, C₁₀, C₁₁, C₁₂, C₁₃, C₁₄, C₁₅, C₁₆, C₁₇, C₁₈, C₁₉, or C₂₀ alkyl. In some embodiments, R is optionally substituted linear C₁, C₂, C₃, C₄, C₅, C₆, C₇, C₈, C₉, C₁₀, C₁₁, C₁₂, C₁₃, C₁₄, C₁₅, C₁₆, C₁₇, C₁₈, C₁₉, or C₂₀ alkyl. In some embodiments, R is linear C₁, C₂, C₃, C₄, C₅, C₆, C₇, C₈, C₉, C₁₀, C₁₁, C₁₂, C₁₃, C₁₄, C₁₅, C₁₆, C₁₇, C₁₈, C₁₉, or C₂₀ alkyl. In some embodiments, R is optionally substituted phenyl. In some embodiments, R is phenyl. In some embodiments, R is p-methylphenyl. In some embodiments, R is 4-dimethylaminophenyl. In some embodiments, R is 3-pyridinyl. In some embodiments, R is

[chemical structure]

In some embodiments, R is

[chemical structure]

In some embodiments, R is benzyl. In some embodiments, R is optionally substituted heteroaryl. In some embodiments, R is optionally substituted 1,3-diazolyl. In some embodiments, R is optionally substituted 2-(1,3)-diazolyl. In some embodiments, R is optionally substituted 1-methyl-2-(1,3)-diazolyl. In some embodiments, R is isopropyl. In some embodiments, R″ is —N(R′)₂. In some embodiments, R″ is —N(CH₃)₂. In some embodiments, R″, e.g., in —SO₂R″, is —OR′, wherein R′ is as described herein. In some embodiments, R′ is R as described herein. In some embodiments, R″ is —OCH₃. In some embodiments, a linkage is —OP(═O)(—NHSO₂R)O—, wherein R is as described herein. In some embodiments, R is optionally substituted linear alkyl as described herein. In some embodiments, R is linear alkyl as described herein. In some embodiments, a linkage is —OP(═O)(—NHSO₂CH₃)O—. In some embodiments, a linkage is —OP(═O)(—NHSO₂CH₂CH₃)O—. In some embodiments, a linkage is —OP(═O)(—NHSO₂CH₂CH₂OCH₃)O—. In some embodiments, a linkage is —OP(═O)(—NHSO₂CH₂Ph)O—. In some embodiments, a linkage is —OP(═O)(—NHSO₂CH₂CHF₂)O—. In some embodiments, a linkage is —OP(═O)(—NHSO₂(4-methylphenyl))O—. In some embodiments, —X—R^{L} is

[chemical structure]

In some embodiments, a linkage is —OP(═O)(—X—R^{L})O—, wherein —X—R^{L} is

[chemical structure]

In some embodiments, a linkage is —OP(═O)(—NHSO₂CH(CH₃)₂)O—. In some embodiments, a linkage is —OP(═O)(—NHSO₂N(CH₃)₂)O—.

[0492] In some embodiments, an internucleotidic linkage has the structure of —P(═O)(—N(R′)C(O)R″)—, wherein R″ is as described herein. In some embodiments, an internucleotidic linkage has the structure of —P(═S)(—N(R′)C(O)R″)—, wherein R″ is as described herein. In some embodiments, an internucleotidic linkage has the structure of —P(═O)(—N(R′)C(O)R″)O—, wherein R″ is as described herein. In some embodiments, an internucleotidic linkage has the structure of —P(═S)(—N(R′)C(O)R″)O—, wherein R″ is as described herein. In some embodiments, an internucleotidic linkage has the structure of —OP(═O)(—N(R′)C(O)R″)O—, wherein R″ is as described herein. In some embodiments, an internucleotidic linkage has the structure of —OP(═S)(—N(R′)C(O)R″)O—, wherein R″ is as described herein. In some embodiments, R′, e.g., of —N(R′)—, is hydrogen or optionally substituted C₁₋₆ aliphatic. In some embodiments, R′ is C₁₋₆ alkyl. In some embodiments, R′ is hydrogen. In some embodiments, R″, e.g., in —C(O)R″, is R′ as described herein. In some embodiments, an internucleotidic linkage has the structure of —P(═O)(—NHC(O)R″)—, wherein R″ is as described herein. In some embodiments, an internucleotidic linkage has the structure of —P(═S)(—NHC(O)R″)—, wherein R″ is as described herein. In some embodiments, an internucleotidic linkage has the structure of —P(═O)(—NHC(O)R″)O—, wherein R″ is as described herein. In some embodiments, an internucleotidic linkage has the structure of —P(═S)(—NHC(O)R″)O—, wherein R″ is as described herein. In some embodiments, an internucleotidic linkage has the structure of —OP(═O)(—NHC(O)R″)O—, wherein R″ is as described herein. In some embodiments, an internucleotidic linkage has the structure of —OP(═S)(—NHC(O)R″)O—, wherein R″ is as described herein. In some embodiments, —X—R^{L}is —N(R′)COR^{L}, wherein R^{L} is as described herein. In some embodiments, —X—R^{L} is —N(R′)COR″, wherein R″ is as described herein. In some embodiments, —X—R^{L} is —N(R′)COR′, wherein R′ is as described herein. In some embodiments, —X—R^{L} is —NHCOR′, wherein R′ is as described herein. In some embodiments, R′ is R as described herein. In some embodiments, R′ is optionally substituted C₁₋₆ aliphatic. In some embodiments, R′ is optionally substituted C₁₋₆ alkyl. In some embodiments, R′ is optionally substituted phenyl. In some embodiments, R′ is optionally substituted heteroaryl. In some embodiments, R″, e.g., in —C(O)R″, is R. In some embodiments, R is an optionally substituted group selected from C₁₋₆ aliphatic, aryl, heterocyclyl, and heteroaryl. In some embodiments, R is optionally substituted C₁₋₆ aliphatic. In some embodiments, R is optionally substituted C₁₋₆ alkyl. In some embodiments, R is optionally substituted C₁₋₆ alkenyl. In some embodiments, R is optionally substituted C₁₋₆ alkynyl. In some embodiments, R is methyl. In some embodiments, —X—R^{L} is —NHC(O)CH₃. In some embodiments, R is optionally substituted methyl. In some embodiments, R is —CF₃. In some embodiments, R is optionally substituted ethyl. In some embodiments, R is ethyl. In some embodiments, R is —CH₂CHF₂. In some embodiments, R is —CH₂CH₂OCH₃. In some embodiments, R is optionally substituted C₁₋₂₀ (e.g., C₁₋₆, C₂₋₆, C₃₋₆, C₁₋₁₀, C₂₋₁₀, C₃₋₁₀, C₂-2₀, C₃₋₂₀, C₁₀₋₂₀, 1, 2, 3, 4, 5, 6, 7, 8, 9, 10, 11, 12, 13, 14, 15, 16, 17, 18, 19, or 20, etc.) aliphatic. In some embodiments, R is optionally substituted C₁₋₂₀ (e.g., C₁₋₆, C₂₋₆, C₃₋₆, C₁₋₁₀, C₂₋₁₀, C₃₋₁₀, C₂₋₂₀, C₃₋₂₀, C₁₀₋₂₀, 1, 2, 3, 4, 5, 6, 7, 8, 9, 10, 11, 12, 13, 14, 15, 16, 17, 18, 19, or 20, etc.) alkyl. In some embodiments, R is an optionally substituted linear C₂₋₂₀ aliphatic. In some embodiments, R is optionally substituted linear C₂₋₂₀ alkyl. In some embodiments, R is linear C₂₋₂₀ alkyl. In some embodiments, R is optionally substituted C₁, C₂, C₃, C₄, C₅, C₆, C₇, C₈, C₉, C₁₀, C₁₁, C₁₂, C₁₃, C₁₄, C₁₅, C₁₆, C₁₇, C₁₈, C₁₉, or C₂₀ aliphatic. In some embodiments, R is optionally substituted C₁, C₂, C₃, C₄, C₅, C₆, C₇, C₈, C₉, C₁₀, C₁₁, C₁₂, C₁₃, C₁₄, C₁₅, C₁₆, C₁₇, C₁₈, C₁₉, or C₂₀ alkyl. In some embodiments, R is optionally substituted linear C₁, C₂, C₃, C₄, C₅, C₆, C₇, C₈, C₉, C₁₀, C₁₁, C₁₂, C₁₃, C₁₄, C₁₅, C₁₆, C₁₇, C₁₈, C₁₉, or C₂₀ alkyl. In some embodiments, R is linear C₁, C₂, C₃, C₄, C₅, C₆, C₇, C₈, C₉, C₁₀, C₁₁, C₁₂, C₁₃, C₁₄, C₁₅, C₁₆, C₁₇, C₁₈, C₁₉, or C₂₀ alkyl. In some embodiments, R is optionally substituted aryl. In some embodiments, R is optionally substituted phenyl. In some embodiments, R is p-methylphenyl. In some embodiments, R is benzyl. In some embodiments, R is optionally substituted heteroaryl. In some embodiments, R is optionally substituted 1,3-diazolyl. In some embodiments, R is optionally substituted 2-(1,3)-diazolyl. In some embodiments, R is optionally substituted 1-methyl-2-(1,3)-diazolyl. In some embodiments, R^{L} is —(CH₂)₅NH₂. In some embodiments, R^{L} is

[chemical structure]

In some embodiments, R^{L} is

[chemical structure]

In some embodiments, R″ is —N(R′)₂. In some embodiments, R″ is —N(CH₃)₂. In some embodiments, —X—R^{L} is —N(R′)CON(R^{L})₂, wherein each of R′ and R^{L} is independently as described herein. In some embodiments, —X—R^{L} is —NHCON(R^{L})₂, wherein R^{L} is as described herein. In some embodiments, two R′ or two R^{L} are taken together with the nitrogen atom to which they are attached to form a ring as described herein, e.g., optionally substituted

[chemical structure]

In some embodiments, R″, e.g., in —C(O)R″, is —OR′, wherein R′ is as described herein. In some embodiments, R′ is R as described herein. In some embodiments, is optionally substituted C₁₋₆ aliphatic. In some embodiments, is optionally substituted C₁₋₆ alkyl. In some embodiments, R″ is —OCH₃. In some embodiments, —X—R^{L} is —N(R′)C(O)OR^{L}, wherein each of R′ and R^{L} is independently as described herein. In some embodiments, R is

[chemical structure]

In some embodiments, —X—R^{L} is —NHC(O)OCH₃. In some embodiments, —X—R^{L} is —NHC(O)N(CH₃)₂. In some embodiments, a linkage is —OP(O)(NHC(O)CH₃)O—. In some embodiments, a linkage is —OP(O)(NHC(O)OCH₃)O—. In some embodiments, a linkage is —OP(O)(NHC(O)(p-methylphenyl))O—. In some embodiments, a linkage is —OP(O)(NHC(O)N(CH₃)₂)O—. In some embodiments, —X—R^{L} is —N(R′)R^{L}, wherein each of R′ and R^{L} is independently as described herein. In some embodiments, —X—R^{L} is —N(R′)R^{L}, wherein each of R′ and R^{L} is independently not hydrogen. In some embodiments, —X—R^{L} is —NHR^{L}, wherein R^{L} is as described herein. In some embodiments, R^{L} is not hydrogen. In some embodiments, R^{L} is optionally substituted aryl or heteroaryl. In some embodiments, R^{L} is optionally substituted aryl. In some embodiments, R^{L} is optionally substituted phenyl. In some embodiments, —X—R^{L} is —N(R′)₂, wherein each R′ is independently as described herein. In some embodiments, —X—R^{L} is —NHR′, wherein R′ is as described herein. In some embodiments, —X—R^{L} is —NHR, wherein R is as described herein. In some embodiments, —X—R^{L} is R^{L}, wherein R^{L} is as described herein. In some embodiments, R^{L} is —N(R′)₂, wherein each R′ is independently as described herein. In some embodiments, R^{L} is —NHR′, wherein R′ is as described herein. In some embodiments, R^{L} is —NHR, wherein R is as described herein. In some embodiments, R^{L} is —N(R′)₂, wherein each R′ is independently as described herein. In some embodiments, none of R′ in —N(R′)₂ is hydrogen. In some embodiments, R^{L} is —N(R′)₂, wherein each R′ is independently C₁₋₆ aliphatic. In some embodiments, R^{L} is -L-R′, wherein each of L and R′ is independently as described herein. In some embodiments, R^{L} is -L-R, wherein each of L and R is independently as described herein. In some embodiments, R^{L} is —N(R′)—Cy-N(R′)—R′. In some embodiments, R^{L} is —N(R′)—Cy-C(O)—R′. In some embodiments, R^{L} is —N(R′)—Cy-O—R′. In some embodiments, R^{L} is —N(R′)—Cy-SO₂—R′. In some embodiments, R^{L} is —N(R′)—Cy-SO₂—N(R′)₂. In some embodiments, R^{L} is —N(R′)—Cy-C(O)—N(R′)₂. In some embodiments, R^{L} is —N(R′) -Cy-OP(O)(R″)₂. In some embodiments, -Cy- is an optionally substituted bivalent aryl group. In some embodiments, -Cy- is optionally substituted phenylene. In some embodiments, -Cy- is optionally substituted 1,4-phenylene. In some embodiments, -Cy- is 1,4-phenylene. In some embodiments, R^{L} is —N(CH₃)₂. In some embodiments, R^{L} is —N(i-Pr)₂. In some embodiments, R^{L} is

[chemical structure]

In some embodiments, R^{L} is

[chemical structure]

In some embodiments, R^{L} is

[chemical structure]

In some embodiments, R^{L} is

[chemical structure]

In some embodiments, R^{L} is

[chemical structure]

In some embodiments, R^{L} is

[chemical structure]

In some embodiments, R^{L} is

[chemical structure]

In some embodiments, R^{L} is

[chemical structure]

In some embodiments, R^{L} is

[chemical structure]

In some embodiments, R^{L} is

[chemical structure]

In some embodiments, R^{L} is

[chemical structure]

In some embodiments, R^{L} is

[chemical structure]

In some embodiments, R^{L} is

[chemical structure]

In some embodiments, R^{L} is

[chemical structure]

In some embodiments, R^{L} is

[chemical structure]

In some embodiments, R^{L} is

[chemical structure]

In some embodiments, R^{L} is

[chemical structure]

In some embodiments, R^{L} is

[chemical structure]

In some embodiments, R^{L} is

[chemical structure]

[chemical structure]

In some embodiments, —X—R^{L} is —N(R′)—C(O)-Cy-R^{L} In some embodiments, —X—R^{L} is R^{L}. In some embodiments, R^{L} is —N(R′)—C(O)-Cy-O—R′. In some embodiments, R^{L} is —N(R′)—C(O)-Cy-R′. In some embodiments, R^{L} is —N(R′)—C(O) -Cy-C(O)—R′. In some embodiments, R^{L} is —N(R′)—C(O)-Cy-N(R′)₂. In some embodiments, R^{L} is —N(R′)—C(O)-Cy-SO₂—N(R′)₂. In some embodiments, R^{L} is —N(R′)—C(O)-Cy-C(O)—N(R′)₂. In some embodiments, R^{L} is —N(R′)—C(O)-Cy-C(O)—N(R′)—SO₂—R′. In some embodiments, R′ is R as described herein. In some embodiments, R^{L} is

[chemical structure]

[0493] As described herein, in some embodiments, one or more methylene units of L, or a variable which comprises or is L, are independently replaced with —O—, —N(R′)—, —(O)—, —C(O)N(R′)—, —SO₂—, —SO₂N(R′)—, or -Cy-. In some embodiments, a methylene unit is replaced with -Cy-. In some embodiments, -Cy- is an optionally substituted bivalent aryl group. In some embodiments, -Cy- is optionally substituted phenylene. In some embodiments, -Cy- is optionally substituted 1,4-phenylene. In some embodiments, -Cy- is an optionally substituted bivalent 5-20 (e.g. 5, 6, 7, 8, 9, 10, 11, 12, 13, 14, 15, 16, 17, 18, 19, or 20) membered heteroaryl group having 1-10 (e.g., 1, 2, 3, 4, 5, 6, 7, 8, 9, or 10) heteroatoms. In some embodiments, -Cy- is monocyclic. In some embodiments, -Cy- is bicyclic. In some embodiments, -Cy- is polycyclic. In some embodiments, each monocyclic unit in -Cy- is independently 3-10 (e.g., 3, 4, 5, 6, 7, 8, 9, or 10) membered, and is independently saturated, partially saturated, or aromatic. In some embodiments, -Cy- is an optionally substituted 3-20 (e.g., 3, 4, 5, 6, 7, 8, 9, 10, 11, 12, 13, 14, 15, 16, 17, 18, 19, or 20) membered monocyclic, bicyclic or polycyclic aliphatic group. In some embodiments, -Cy- is an optionally substituted 3-20 (e.g., 3,4, 5,6, 7, 8,9, 10, 11, 12, 13, 14, 15, 16, 17, 18, 19, or 20) membered monocyclic, bicyclic or polycyclic heteroaliphatic group having 1-10 (e.g., 1, 2, 3, 4, 5, 6, 7, 8, 9, or 10) heteroatoms.

[0494] In some embodiments, an internucleotidic linkage has the structure of —P(═O)(—N(R′)P(O)R″)₂)—, wherein each R″ is independently as described herein. In some embodiments, an internucleotidic linkage has the structure of —P(═S)(—N(R′)P(O)(R″)₂)—, wherein each R″ is independently as described herein. In some embodiments, an internucleotidic linkage has the structure of —P(═O)(—N(R′)P(O)(R″)₂)O—, wherein each R″ is independently as described herein. In some embodiments, an internucleotidic linkage has the structure of —P(═S)(—N(R′)P(O)(R″)₂)O—, wherein each R″ is independently as described herein. In some embodiments, an internucleotidic linkage has the structure of —OP(═O)(—N(R′)P(O)(R″)₂)O—, wherein each R″ is independently as described herein. In some embodiments, an internucleotidic linkage has the structure of —OP(═S)(—N(R′)P(O)(R″)₂)O—, wherein each R″ is independently as described herein. In some embodiments, R′, e.g., of —N(R′)—, is hydrogen or optionally substituted C₁₋₆ aliphatic. In some embodiments, R′ is C₁₋₆ alkyl. In some embodiments, R′ is hydrogen. In some embodiments, R″, e.g., in —P(O)(R″)₂, is R′ as described herein. In some embodiments, an internucleotidic linkage has the structure of —P(═O)(—NHP(O)(R″)₂)—, wherein each R″ is independently as described herein. In some embodiments, an internucleotidic linkage has the structure of —P(═S)(—NHP(O)(R″)₂)—, wherein each R″ is independently as described herein. In some embodiments, an internucleotidic linkage has the structure of —P(═O)(—NHP(O)(R″)₂)O—, wherein each R″ is independently as described herein. In some embodiments, an internucleotidic linkage has the structure of —P(═S)(—NHP(O)(R″)₂)O—, wherein each R″ is independently as described herein. In some embodiments, an internucleotidic linkage has the structure of —OP(═O)(—NHP(O)(R″)₂)O—, wherein each R″ is independently as described herein. In some embodiments, an internucleotidic linkage has the structure of —OP(═S)(—NHP(O)(R″)₂)O—, wherein each R″ is independently as described herein. In some embodiments, an occurrence of R″, e.g., in —P(O)(R″)₂, is R. In some embodiments, R is an optionally substituted group selected from C₁₋₆ aliphatic, aryl, heterocyclyl, and heteroaryl. In some embodiments, R is optionally substituted C₁₋₆ aliphatic. In some embodiments, R is optionally substituted C₁₋₆ alkyl. In some embodiments, R is optionally substituted C₁₋₆ alkenyl. In some embodiments, R is optionally substituted C₁₋₆ alkynyl. In some embodiments, R is methyl. In some embodiments, R is optionally substituted methyl. In some embodiments, R is —CF₃. In some embodiments, R is optionally substituted ethyl. In some embodiments, R is ethyl. In some embodiments, R is —CH₂CHF₂. In some embodiments, R is —CH₂CH₂OCH₃. In some embodiments, R is optionally substituted C₁₋₂₀ (e.g., C₁—, C₂₋₆, C₃₋₆, C₁₋₁₀, C₂₋₁₀, C₃₋₁₀, C₂₋₂₀, C₃₋₂₀, C₁₀₋₂₀, 1, 2, 3, 4, 5, 6, 7, 8, 9, 10, 11, 12, 13, 14, 15, 16, 17, 18, 19, or 20, etc.) aliphatic. In some embodiments, R is optionally substituted C₁₋₂₀ (e.g., C₁₋₆, C₂₋₆, C₃₋₆, C₁₋₁₀, C₂₋₁₀, C₃₋₁₀, C₂₋₂₀, C₃₋₂₀, C₁₀₋₂₀, 1, 2, 3, 4, 5, 6, 7, 8, 9, 10, 11, 12, 13, 14, 15, 16, 17, 18, 19, or 20, etc.) alkyl. In some embodiments, R is an optionally substituted linear C₂₋₂₀ aliphatic. In some embodiments, R is optionally substituted linear C₂-20 alkyl. In some embodiments, R is linear C₂₋₂₀ alkyl. In some embodiments, R is isopropyl. In some embodiments, R is optionally substituted C₁, C₂, C₃, C₄, C₅, C₆, C₇, C₈, C₉, C₁₀, C₁₁, C₁₂, C₁₃, C₁₄, C₁₅, C₁₆, C₁₇, C₁₈, C₁₉, or C₂₀ aliphatic. In some embodiments, R is optionally substituted C₁, C₂, C₃, C₄, C₅, C₆, C₇, C₈, C₉, C₁₀, C₁₁, C₁₂, C₁₃, C₁₄, C₁₅, C₁₆, C₁₇, C₁₈, C₁₉, or C₂₀ alkyl. In some embodiments, R is optionally substituted linear C₁, C₂, C₃, C₄, C₅, C₆, C₇, C₈, C₉, C₁₀, C₁₁, C₁₂, C₁₃, C₁₄, C₁₅, C₁₆, C₁₇, C₁₈, C₁₉, or C₂₀ alkyl. In some embodiments, R is linear C₁, C₂, C₃, C₄, C₅, C₆, C₇, C₈, C₉, C₁₀, C₁₁, C₁₂, C₁₃, C₁₄, C₁₅, C₁₆, C₁₇, C₁₈, C₁₉, or C₂ alkyl. In some embodiments, each R″ is independently R as described herein, for example, in some embodiments, each R″ is methyl. In some embodiments, R″ is optionally substituted aryl. In some embodiments, R is optionally substituted phenyl. In some embodiments, R is p-methylphenyl. In some embodiments, R is benzyl. In some embodiments, R is optionally substituted heteroaryl. In some embodiments, R is optionally substituted 1,3-diazolyl. In some embodiments, R is optionally substituted 2-(1,3)-diazolyl. In some embodiments, R is optionally substituted 1-methyl-2-(1,3)-diazolyl. In some embodiments, an occurrence of R″ is —N(R′)₂. In some embodiments, R″ is —N(CH₃)₂. In some embodiments, an occurrence of R″, e.g., in —P(O)(R″)₂, is —OR′, wherein R′ is as described herein. In some embodiments, R′ is R as described herein. In some embodiments, is optionally substituted C₁₋₆ aliphatic. In some embodiments, is optionally substituted C₁₋₆ alkyl. In some embodiments, R″ is —OCH₃. In some embodiments, each R″ is —OR′ as described herein. In some embodiments, each R″ is —OCH₃. In some embodiments, each R″ is —OH. In some embodiments, a linkage is —OP(O)(NHP(O)(OH)₂)O—. In some embodiments, a linkage is —OP(O)(NHP(O)(OCH₃)₂)O—. In some embodiments, a linkage is —OP(O)(NHP(O)(CH₃)O—.

[0495] In some embodiments, —N(R″)₂ is —N(R′)₂. In some embodiments, —N(R″)₂ is —NHR. In some embodiments, —N(R″)₂ is —NHC(O)R. In some embodiments, —N(R″)₂ is —NHC(O)OR. In some embodiments, —N(R″)₂ is —NHS(O)₂R In some embodiments, an internucleotidic linkage is a phosphoryl guanidine internucleotidic linkage. In some embodiments, an internucleotidic linkage comprises —X—R^{L} as described herein. In some embodiments, —X—R^{L} is —N═C(-L^{L}-R^{L}) In some embodiments, —X—R^{L} is —N═C[N(R^{L})₂]₂. In some embodiments, —X—R^{L} is —N═C[NR′R^{L}]₂. In some embodiments, —X—R^{L} is —N═C[N(R′)₂]₂. In some embodiments, —X—R^{L} is —N═C[N(R^{L})₂](CHR^{L1}R^{L2}), wherein each of R^{L} and R^{L2} is independently as described herein. In some embodiments, —X—R^{L} is —N═C(NR′R^{L})(CHR^{L1}R^{L2}), wherein each of R^{L1} and R^{L2} is independently as described herein. In some embodiments, —X—R^{L} is —N═C(NR′R^{L})(CR′R^{L1}R^{L2}), wherein each of R^{L1} and R^{L2} is independently as described herein. In some embodiments, —X—R^{L} is —N═C[N(R′)₂](CHR′R^{L2}). In some embodiments, —X—R^{L} is —N═C[N(R^{L})₂](R^{L}). In some embodiments, —X—R^{L} is —N═C(NR′R^{L})(R^{L}). In some embodiments, —X—R^{L} is —N═C(NR′R^{L})(R′). In some embodiments, —X—R^{L} is —N═C[N(R′)₂](R′). In some embodiments, —X—R^{L} is —N═C(NR′R^{L1})(NR′R^{L2}), wherein each R^{L1} and R^{L2} is independently R^{L}, and each R′ and R^{L} is independently as described herein. In some embodiments, —X—R^{L} is —N═C(NR′R^{L1})(NR′R^{L2}), wherein variable is independently as described herein. In some embodiments, —X—R^{L} is —N═C(NR′R^{L1})(CHR′R^{L2}), wherein variable is independently as described herein. In some embodiments, —X—R^{L} is —N═C(NR′R^{L1})(R′), wherein variable is independently as described herein. In some embodiments, each R′ is independently R. In some embodiments, R is optionally substituted C₁₋₆ aliphatic. In some embodiments, R is methyl. In some embodiments, —X—R^{L} is

[chemical structure]

In some embodiments, two groups selected from R′, R^{L}, R^{L1}, R^{L2}, etc. (in some embodiments, on the same atom (e.g., —N(R′)₂, or —NR′R^{L}, or —N(R^{L})², wherein R′ and R^{L} can independently be R as described herein), etc.), or on different atoms (e.g., the two R′ in —N═C(NR′R^{L})(CR′R^{L1}R^{L2}) or —N═C(NR′R^{L1})(NR′R^{L2}); can also be two other variables that can be R, e.g., R^{L}, R^{L1}, R^{L2}, etc.)) are independently R and are taken together with their intervening atoms to form a ring as described herein. In some embodiments, two of R, R′, R^{L}, R^{L1}, or R^{L2} on the same atom, e.g., of —N(R′)₂, —N(R^{L})₂, —NR′R^{L}, —NR′R^{L1}, —NR′R^{L2}, —CR′R^{L1}R^{L2}, etc., are taken together to form a ring as described herein. In some embodiments, two R′, R^{L}, R^{L1}, or R^{L2} on two different atoms, e.g., the two R′ in —N═C(NR′R^{L})(CR′R^{L1}R^{L2}), —N═C(NR′R^{L1})(NR′R^{L2}), etc. are taken together to form a ring as described herein. In some embodiments, a formed ring is an optionally substituted 3-20 (e.g., 3-15, 3-12, 3-10, 3-9, 3-8, 3-7, 3-6, 4-15, 4-12, 4-10, 4-9, 4-8, 4-7, 4-6, 5-15, 5-12, 5-10, 5-9, 5-8, 5-7, 5-6, 1, 2, 3, 4, 5, 6, 7, 8, 9, 10, 11, 12, 13, 14, 15, 16, 17, 18, 19, 20, etc.) monocyclic, bicyclic or tricyclic ring having 0-5 additional heteroatoms. In some embodiments, a formed ring is monocyclic as described herein. In some embodiments, a formed ring is an optionally substituted 5-10 membered monocyclic ring. In some embodiments, a formed ring is bicyclic. In some embodiments, a formed ring is polycyclic. In some embodiments, two groups that are or can be R (e.g., the two R′ in —N═C(NR′R^{L})(CR′R^{L1}R^{L2}) or —N═C(NR′R^{L1})(NR′R^{L2}), the two R′ in —N═C(NR′R^{L})(CR′R^{L1}R^{L2}), —N═C(NR′R^{L1})(NR′R^{L2}), etc.) are taken together to form an optionally substituted bivalent hydrocarbon chain, e.g., an optionally substituted C₁₋₂₀ aliphatic chain, optionally substituted —(CH₂)n- wherein n is 1-20 (e.g., 1, 2, 3, 4, 5, 6, 7, 8, 9, 10, 11, 12, 13, 14, 15, 16, 17, 18, 19, or 20). In some embodiments, a hydrocarbon chain is saturated. In some embodiments, a hydrocarbon chain is partially unsaturated. In some embodiments, a hydrocarbon chain is unsaturated. In some embodiments, two groups that are or can be R (e.g., the two R′ in —N═C(NR′R^{L})(CR′R^{L1}R^{L2}) or —N═C(NR′R^{L1})(NR′R^{L2}), the two R′ in —N═C(NR′R^{L})(CR′R^{L1}R^{L2}), —N═C(NR′R^{L1})(NR′R^{L2}), etc.) are taken together to form an optionally substituted bivalent heteroaliphatic chain, e.g., an optionally substituted C₁₋₂₀ heteroaliphatic chain having 1-10 heteroatoms. In some embodiments, a heteroaliphatic chain is saturated. In some embodiments, a heteroaliphatic chain is partially unsaturated. In some embodiments, a heteroaliphatic chain is unsaturated. In some embodiments, a chain is optionally substituted —(CH₂)—. In some embodiments, a chain is optionally substituted —(CH₂)₂—. In some embodiments, a chain is optionally substituted —(CH₂)—. In some embodiments, a chain is optionally substituted —(CH₂)₂—. In some embodiments, a chain is optionally substituted —(CH₂)₃—. In some embodiments, a chain is optionally substituted —(CH₂)₄—. In some embodiments, a chain is optionally substituted —(CH₂)₅—. In some embodiments, a chain is optionally substituted —(CH₂)₆—. In some embodiments, a chain is optionally substituted —CH═CH—. In some embodiments, a chain is optionally substituted

[chemical structure]

In some embodiments, a chain is optionally substituted

[chemical structure]

In some embodiments, a chain is optionally substituted

[chemical structure]

In some embodiments, a chain is optionally substituted

[chemical structure]

In some embodiments, a chain is optionally substituted

[chemical structure]

In some embodiments, a chain is optionally substituted

[chemical structure]

In some embodiments, a chain is optionally substituted

[chemical structure]

In some embodiments, a chain is optionally substituted

[chemical structure]

In some embodiments, a chain is optionally substituted

[chemical structure]

In some embodiments, two of R, R′, R^{L}, R^{L1}, R^{L2}, etc. on different atoms are taken together to form a ring as described herein. For examples, in some embodiments, —X—R^{L} is

[chemical structure]

In some embodiments, —X—R^{L} is

[chemical structure]

In some embodiments, —X—R^{L} is

[chemical structure]

In some embodiments, —X—R^{L} is

[chemical structure]

In some embodiments, —X—R^{L} is

[chemical structure]

In some embodiments, —X—R^{L} is

[chemical structure]

In some embodiments, —X—R^{L} is

[chemical structure]

In some embodiments, —X—R^{L} is

[chemical structure]

In some embodiments, —X—R^{L} is

[chemical structure]

In some embodiments, —X—R^{L} is

[chemical structure]

In some embodiments, —N(R′)₂, —N(R)₂, —N(R^{L})₂, —NR′R^{L}, —NR′R^{L1}, —NR′R^{L2}, —NR^{L1}R^{L2}, etc. is a formed ring. In some embodiments, a ring is optionally substituted

[chemical structure]

In some embodiments, a ring is optionally substituted

[chemical structure]

In some embodiments, a ring is optionally substituted

[chemical structure]

In some embodiments, a ring is optionally substituted

[chemical structure]

In some embodiments, a ring is optionally substituted

[chemical structure]

In some embodiments, a ring is optionally substituted

[chemical structure]

In some embodiments, a ring is optionally substituted

[chemical structure]

In some embodiments, a ring is optionally substituted

[chemical structure]

In some embodiments, a ring is optionally substituted

[chemical structure]

In some embodiments, a ring is optionally substituted

[chemical structure]

In some embodiments, a ring is optionally substituted

[chemical structure]

In some embodiments, a ring is optionally substituted

[chemical structure]

In some embodiments, a ring is optionally substituted

[chemical structure]

In some embodiments, a ring is optionally substituted

[chemical structure]

In some embodiments, a ring is optionally substituted

[chemical structure]

[0496] In some embodiments, R^{L1} and R^{L2} are the same. In some embodiments, R^{L1} and R^{L2} are different. In some embodiments, each of R^{L1} and R^{L2} is independently R^{L} as described herein, e.g., below.

[0497] In some embodiments, R^{L} is optionally substituted C₁₋₃₀ aliphatic. In some embodiments, R^{L} is optionally substituted C₁₋₃₀ alkyl. In some embodiments, R^{L} is linear, In some embodiments, R^{L} is optionally substituted linear C₁₋₃₀ alkyl. In some embodiments, R^{L} is optionally substituted C₁₋₆ alkyl. In some embodiments, R^{L} is methyl. In some embodiments, R^{L} is ethyl. In some embodiments, R^{L} is n-propyl. In some embodiments, R^{L} is isopropyl. In some embodiments, R^{L} is n-butyl. In some embodiments, R^{L} is tert-butyl. In some embodiments, R^{L} is (E)-CH₂—CH═CH—CH₂—CH₃. In some embodiments, R^{L} is (Z)—CH₂—CH═CH—CH₂—CH₃. In some embodiments, R^{L} is

[chemical structure]

In some embodiments, R^{L} is

[chemical structure]

In some embodiments, R^{L} is CH₃(CH₂)₂C≡CC≡C(CH₂)₃—. In some embodiments, R^{L} is CH₃(CH₂)₅C≡C—. In some embodiments, R^{L} optionally substituted aryl. In some embodiments, R^{L} is optionally substituted phenyl. In some embodiments, R^{L} is phenyl substituted with one or more halogen. In some embodiments, R^{L} is phenyl optionally substituted with halogen, —N(R′), or —N(R′)C(O)R′. In some embodiments, R^{L} is phenyl optionally substituted with —Cl, —Br, —F, —N(Me)₂, or —NHCOCH₃. In some embodiments, R^{L} is -L^{L}-R′, wherein L^{L} is an optionally substituted C₁₋₂₀ saturated, partially unsaturated or unsaturated hydrocarbon chain. In some embodiments, such a hydrocarbon chain is linear. In some embodiments, such a hydrocarbon chain is unsubstituted. In some embodiments, L^{L} is (E)-CH₂—CH═CH—. In some embodiments, L^{L} is —CH₂—C≡C—CH₂—. In some embodiments, L^{L} is —(CH₂)₃—. In some embodiments, L^{L} is —(CH₂)₄—. In some embodiments, L^{L} is —(CH₂)ₙ—, wherein n is 1-30 (e.g., 1-20, 5-30, 6-30, 1, 2, 3, 4, 5, 6, 7, 8, 9, 10, 11, 12, 13, 14, 15, 16, 17, 18, 19, 20, 21, 22, 23, 24, 25, 26, 27, 28, 29 or 30, etc.). In some embodiments, R′ is optionally substituted aryl as described herein. In some embodiments, R′ is optionally substituted phenyl. In some embodiments, R′ is phenyl. In some embodiments, R′ is optionally substituted heteroaryl as described herein. In some embodiments, R′ is 2′-pyridinyl. In some embodiments, R′ is 3′-pyridinyl. In some embodiments, R^{L} is

[chemical structure]

In some embodiments, R^{L} is

[chemical structure]

In some embodiments, R^{L} is

[chemical structure]

In some embodiments, R^{L} is -L^{L}-N(R′)₂, wherein each variable is independently as described herein. In some embodiments, each R′ is independently C₁₋₆ aliphatic as described herein. In some embodiments, —N(R′)₂ is —N(CH₃)₂. In some embodiments, —N(R′)₂ is —NH₂. In some embodiments, R^{L} is —(CH₂)ₙ—N(R′)₂, wherein n is 1-30 (e.g., 1-20, 5-30, 6-30, 1, 2, 3, 4, 5, 6, 7, 8, 9, 10, 11, 12, 13, 14, 15, 16, 17, 18, 19, 20, 21, 22, 23, 24, 25, 26, 27, 28, 29 or 30, etc.). In some embodiments, R^{L} is —(CH₂CH₂O)ₙ—CH₂CH₂—N(R′)₂, wherein n is 1-30 (e.g., 1-20, 5-30, 6-30, 1, 2, 3, 4, 5, 6, 7, 8, 9, 10, 11, 12, 13, 14, 15, 16, 17, 18, 19, 20, 21, 22, 23, 24, 25, 26, 27, 28, 29 or 30, etc.). In some embodiments, R^{L} is

[chemical structure]

In some embodiments, R^{L} is

[chemical structure]

In some embodiments, R^{L} is

[chemical structure]

In some embodiments, R^{L} is —(CH₂)ₙ—NH₂. In some embodiments, R^{L} is —(CH₂CH₂O)ₙ—CH₂CH₂—NH₂. In some embodiments, R^{L} is —(CH₂CH₂O)ₙ—CH₂CH₂—R′, wherein n is 1-30 (e.g., 1-20, 5-30, 6-30, 1, 2, 3, 4, 5, 6, 7, 8, 9, 10, 11, 12, 13, 14, 15, 16, 17, 18, 19, 20, 21, 22, 23, 24, 25, 26, 27, 28, 29 or 30, etc.). In some embodiments, R^{L} is —(CH₂CH₂O)ₙ—CH₂CH₂CH₃, wherein n is 1-30 (e.g., 1-20, 5-30, 6-30, 1, 2, 3, 4, 5, 6, 7, 8, 9, 10, 11, 12, 13, 14, 15, 16, 17, 18, 19, 20, 21, 22, 23, 24, 25, 26, 27, 28, 29 or 30, etc.). In some embodiments, R^{L} is —(CH₂CH₂O)ₙ—CH₂CH₂OH, wherein n is 1-30 (e.g., 1-20, 5-30, 6-30, 1, 2, 3, 4, 5, 6, 7, 8, 9, 10, 11, 12, 13, 14, 15, 16, 17, 18, 19, 20, 21, 22, 23, 24, 25, 26, 27, 28, 29 or 30, etc.). In some embodiments, R^{L} is or comprises a carbohydrate moiety, e.g., GalNAc. In some embodiments, R^{L} is -L^{L}-GalNAc. In some embodiments, R^{L} is

[chemical structure]

In some embodiments, one or more methylene units of L^{L} are independently replaced with -Cy- (e.g., optionally substituted 1,4-phenylene, a 3-30 membered bivalent optionally substituted monocyclic, bicyclic, or polycyclic cycloaliphatic ring, etc.), —O—, —N(R′)— (e.g., —NH), —C(O)—, —C(O)N(R′)— (e.g., —C(O)NH—), —C(NR′)— (e.g., —C(NH)—), —N(R′)C(O)(N(R′)— (e.g., —NHC(O)NH—), —N(R′)C(NR′)(N(R′)— (e.g., —NHC(NH)NH—), —(CH₂CH₂O)ₙ—, etc. For example, in some embodiments, R^{L} is

[chemical structure]

In some embodiments, R^{L} is

[chemical structure]

In some embodiments, R^{L} is

[chemical structure]

In some embodiments, R^{L} is

[chemical structure]

In some embodiments, R^{L} is

[chemical structure]

wherein n is 0-20. In some embodiments, R^{L} is or comprises one or more additional chemical moieties (e.g., carbohydrate moieties, GalNAc moieties, etc.) optionally substituted connected through a linker (which can be bivalent or polyvalent). For example, in some embodiments, R^{L} is

[chemical structure]

wherein n is 0-20. In some embodiments, R^{L} is

[chemical structure]

wherein n is 0-20. In some embodiments, R^{L} is R′ as described herein. As described herein, many variable can independently be R′. In some embodiments, R′ is R as described herein. As described herein, various variables can independently be R In some embodiments, R is optionally substituted C₁₋₆ aliphatic. In some embodiments, R is optionally substituted C₁₋₆ alkyl. In some embodiments, R is methyl. In some embodiments, R is optionally substituted cycloaliphatic. In some embodiments, R is optionally substituted cycloalkyl. In some embodiments, R is optionally substituted aryl. In some embodiments, R is optionally substituted phenyl. In some embodiments, R is optionally substituted heteroaryl. In some embodiments, R is optionally substituted heterocyclyl. In some embodiments, R is optionally substituted C₁₋₂₀ heterocyclyl having 1-5 heteroatoms, e.g., one of which is nitrogen. In some embodiments, R is optionally substituted

[chemical structure]

In some embodiments, R is optionally substituted

[chemical structure]

In some embodiments, R is optionally substituted

[chemical structure]

In some embodiments, R is optionally substituted

[chemical structure]

In some embodiments, R is optionally substituted

[chemical structure]

In some embodiments, R is optionally substituted

[chemical structure]

In some embodiments, R is optionally substituted

[chemical structure]

In some embodiments, R is optionally substituted

[chemical structure]

In some embodiments, R is optionally substituted

[chemical structure]

In some embodiments, R is optionally substituted

[chemical structure]

In some embodiments, R is optionally substituted

[chemical structure]

In some embodiments, R is optionally substituted

[chemical structure]

In some embodiments, R is optionally substituted

[chemical structure]

In some embodiments, R is optionally substituted

[chemical structure]

In some embodiments, R is optionally substituted

[chemical structure]

[0498] In some embodiments, —X—R^{L} is

[chemical structure]

In some embodiments, —X—R^{L} is

[chemical structure]

In some embodiments, —X—R^{L} is

[chemical structure]

In some embodiments, —X—R^{L} is

[chemical structure]

In some embodiments, —X—R^{L} is

[chemical structure]

In some embodiments, —X—R^{L} is

[chemical structure]

In some embodiments, —X—R^{L} is

[chemical structure]

In some embodiments, —X—R^{L} is

[chemical structure]

In some embodiments, —X—R^{L} is

[chemical structure]

In some embodiments, —X—R^{L} is

[chemical structure]

In some embodiments, —X—R^{L} is

[chemical structure]

In some embodiments, —X—R^{L} is

[chemical structure]

In some embodiments, —X—R^{L} is

[chemical structure]

wherein n is 1-20. In some embodiments, —X—R^{L} is

[chemical structure]

wherein n is 1-20. In some embodiments, —X—R^{L} is selected from:

[chemical structure]

In some embodiments, —X—R^{L} is

[chemical structure]

In some embodiments, —X—R^{L} is

[chemical structure]

In some embodiments, —X—R^{L} is

[chemical structure]

[0499] In some embodiments, R^{L} is R″ as described herein. In some embodiments, R^{L} is R as described herein.

[0500] In some embodiments, R″ or R^{L} is or comprises an additional chemical moiety. In some embodiments, R″ or R^{L} is or comprises an additional chemical moiety, wherein the additional chemical moiety is or comprises a carbohydrate moiety. In some embodiments, R″ or R^{L} is or comprises a GalNAc. In some embodiments, R^{L} or R″ is replaced with, or is utilized to connect to, an additional chemical moiety.

[0501] In some embodiments, X is —O—. In some embodiments, X is —S—. In some embodiments, X is -L^{L}-N(-L^{L}-R^{L})-L^{L}-. In some embodiments, X is —N(-L^{L}-R^{L})-L^{L} In some embodiments, X is -L^{L}-N(-L^{L}-R^{L})—. In some embodiments, X is —N(-L^{L}-R^{L})—. In some embodiments, X is -L^{L}-N═C(-L^{L}-R^{L})-L^{L}-. In some embodiments, X is —N═C(-L^{L}-R^{L})-L^{L}-. In some embodiments, X is -L^{L}-N═C(-L^{L}-R^{L})—. In some embodiments, X is —N═C(-L^{L}-R^{L})—. In some embodiments, X is L^{L}. In some embodiments, X is a covalent bond. In some embodiments, Y is a covalent bond. In some embodiments, Y is —O—. In some embodiments, Y is —N(R′)—. In some embodiments, Z is a covalent bond. In some embodiments, Z is —O—. In some embodiments, Z is —N(R′)—. In some embodiments, R′ is R In some embodiments, R is —H. In some embodiments, R is optionally substituted C₁₋₆ aliphatic. In some embodiments, R is methyl. In some embodiments, R is ethyl. In some embodiments, R is propyl. In some embodiments, R is optionally substituted phenyl. In some embodiments, R is phenyl.

[0502] As described herein, various variables in structures in the present disclosure can be or comprise R Suitable embodiments for R are described extensively in the present disclosure. As appreciated by those skilled in the art, R embodiments described for a variable that can be R may also be applicable to another variable that can be R Similarly, embodiments described for a component/moiety (e.g., L) for a variable may also be applicable to other variables that can be or comprise the component/moiety.

[0503] In some embodiments, R″ is R′. In some embodiments, R″ is —N(R′)₂.

[0504] In some embodiments, —X—R^{L} is —SH. In some embodiments, —X—R^{L} is —OH. In some embodiments, —X—R^{L} is —N(R′)₂. In some embodiments, each R′ is independently optionally substituted C₁₋₆ aliphatic. In some embodiments, each R′ is independently methyl.

[0505] In some embodiments, a non-negatively charged internucleotidic linkage has the structure of —OP(═O)(—N═C((N(R′)₂)—O—. In some embodiments, a R′ group of one N(R′)₂ is R, a R′ group of the other N(R′)₂ is R, and the two R groups are taken together with their intervening atoms to form an optionally substituted ring, e.g., a 5-membered ring as in n001. In some embodiments, each R′ is independently R, wherein each R is independently optionally substituted C₁₋₆ aliphatic.

[0506] In some embodiments, —X—R^{L} is —N═C(-L^{L}-R′)₂. In some embodiments, —X—R^{L} is —N═C(-L^{L1}-L^{L2}-L^{L3}-R′)₂, wherein each L^{L1}, L^{L2} and L^{L3} is independently L″, wherein each L″ is independently a covalent bond, or a bivalent, optionally substituted, linear or branched group selected from a C₁₋₁₀ aliphatic group and a C₁₋₁₀ heteroaliphatic group having 1-5 heteroatoms, wherein one or more methylene units are optionally and independently replaced by an optionally substituted group selected from C₁₋₆ alkylene, C₁₋₆ alkenylene, —C≡C—, a bivalent C₁-C₆ heteroaliphatic group having 1-5 heteroatoms, —C(R′)₂—, -Cy-, —O—, —S—, —S—S—, —N(R′)—, —C(O)—, —C(S)—, —C(NR′)—, —C(O)N(R′)—, —N(R′)C(O)N(R′)—, —N(R′)C(O)O—, —S(O)—, —S(O)₂—, —S(O)₂N(R′)—, —C(O)S—, —C(O)O—, —P(O)(OR′)—, —P(O)(SR′)—, —P(O)(R′)—, —P(O)(NR′)—, —P(S)(OR′)—, —P(S)(SR′)—, —P(S)(R′)—, —P(S)(NR′)—, —P(R′)—, —P(OR′)—, —P(SR′)—, —P(NR′)—, —P(OR′)[B(R′)₃]—, —OP(O)(OR′)O—, —OP(O)(SR′)O—, —OP(O)(R′)O—, —OP(O)(NR′)O—, —OP(OR′)O—, —OP(SR′)O—, —OP(NR′)O—, —OP(R′)O—, or —OP(OR′)[B(R′)₃]O—, and one or more nitrogen or carbon atoms are optionally and independently replaced with Cy^{L}. In some embodiments, L^{L2} is -Cy-. In some embodiments, L^{L1} is a covalent bond. In some embodiments, L^{L3} is a covalent bond. In some embodiments, —X—R^{L} is —N═C(-L^{L1}-Cy-L^{L3}-R′)₂. In some embodiments, —X—R^{L} is [symbol] . In some embodiments, —X—R^{L} is [symbol] . In some embodiments, —X—R^{L} is [symbol] . In some embodiments, —X—R^{L} is [symbol] . In some embodiments, —X—R^{L} is [symbol] . In some embodiments, —X—R^{L} is [symbol] .

[0507] In some embodiments, as utilized in the present disclosure, L is covalent bond. In some embodiments, L is a bivalent, optionally substituted, linear or branched group selected from a C₁₋₃₀ aliphatic group and a C₁₋₃₀ heteroaliphatic group having 1-10 heteroatoms, wherein one or more methylene units are optionally and independently replaced by an optionally substituted group selected from C₁₋₆ alkylene, C₁₋₆ alkenylene, —C≡C—, a bivalent C₁-C₆ heteroaliphatic group having 1-5 heteroatoms, —C(R′)₂—, -Cy-, —O—, —S—, —S—S—, —N(R′)—, —C(O)—, —C(S)—, —C(NR′)—, —C(O)N(R′)—, —N(R′)C(O)N(R′)—, —N(R′)C(O)O—, —S(O)—, —S(O)₂—, —S(O)₂N(R′)—, —C(O)S—, —C(O)O—, —P(O)(OR′)—, —P(O)(SR′)—, —P(O)(R′)—, —P(O)(NR′)—, —P(S)(OR′)—, —P(S)(SR′)—, —P(S)(R′)—, —P(S)(NR′)—, —P(R′)—, —P(OR′)—, —P(SR′)—, —P(NR′)—, —P(OR′)[B(R′)₃]—, —OP(O)(OR′)O—, —OP(O)(SR′)O—, —OP(O)(R′)O—, —OP(O)(NR′)O—, —OP(OR′)O—, —OP(SR′)O—, —OP(NR′)O—, —OP(R′)O—, or —OP(OR′)[B(R′)₃]O—, and one or more nitrogen or carbon atoms are optionally and independently replaced with Cy^{L}. In some embodiments, L is a bivalent, optionally substituted, linear or branched group selected from a C₁₋₃₀ aliphatic group and a C₁₋₃₀ heteroaliphatic group having 1-10 heteroatoms, wherein one or more methylene units are optionally and independently replaced by an optionally substituted group selected from —C≡C—, —C(R′)₂—, -Cy-, —O—, —S—, —S—S—, —N(R′)—, —C(O)—, —C(S)—, —C(NR′)—, —C(O)N(R′)—, —N(R′)C(O)N(R′)—, —N(R′)C(O)O—, —S(O)—, —S(O)₂—, —S(O)₂N(R′)—, —C(O)S—, —C(O)O—, —P(O)(OR′)—, —P(O)(SR′)—, —P(O)(R′)—, —P(O)(NR′)—, —P(S)(OR′)—, —P(S)(SR′)—, —P(S)(R′)—, —P(S)(NR′)—, —P(R′)—, —P(OR′)—, —P(SR′)—, —P(NR′)—, —P(OR′)[B(R′)₃]—, —OP(O)(OR′)O—, —OP(O)(SR′)O—, —OP(O)(R′)O—, —OP(O)(NR′)O—, —OP(OR′)O—, —OP(SR′)O—, —OP(NR′)O—, —OP(R′)O—, or —OP(OR′)[B(R′)₃]O—, and one or more nitrogen or carbon atoms are optionally and independently replaced with Cy^{L}. In some embodiments, L is a bivalent, optionally substituted, linear or branched group selected from a C₁₋₁₀ aliphatic group and a C₁₋₁₀ heteroaliphatic group having 1-10 heteroatoms, wherein one or more methylene units are optionally and independently replaced by an optionally substituted group selected from —C≡C—, —C(R′)₂—, -Cy-, —O—, —S—, —S—S—, —N(R′)—, —C(O)—, —C(S)—, —C(NR′)—, —C(O)N(R′)—, —N(R′)C(O)N(R′)—, —N(R′)C(O)O—, —S(O)—, —S(O)₂—, —S(O)₂N(R′)—, —C(O)S—, —C(O)O—, —P(O)(OR′)—, —P(O)(SR′)—, —P(O)(R′)—, —P(O)(NR′)—, —P(S)(OR′)—, —P(S)(SR′)—, —P(S)(R′)—, —P(S)(NR′)—, —P(R′)—, —P(OR′)—, —P(SR′)—, —P(NR′)—, —P(OR′)[B(R′)₃]—, —OP(O)(OR′)O—, —OP(O)(SR′)O—, —OP(O)(R′)O—, —OP(O)(NR′)O—, —OP(OR′)O—, —OP(SR′)O—, —OP(NR′)O—, —OP(R′)O—, or —OP(OR′)[B(R′)₃]O—, and one or more nitrogen or carbon atoms are optionally and independently replaced with Cy^{L}. In some embodiments, one or more methylene units are optionally and independently replaced by an optionally substituted group selected from —C≡C—, —C(R′)₂—, -Cy-, —O—, —S—, —S—S—, —N(R′)—, —C(O)—, —C(S)—, —C(NR′)—, —C(O)N(R′)—, —N(R′)C(O)N(R′)—, —N(R′)C(O)O—, —S(O)—, —S(O)₂—, —S(O)₂N(R′)—, —C(O)S—, or —C(O)O—.

[0508] In some embodiments, an internucleotidic linkage is a phosphoryl guanidine internucleotidic linkage. In some embodiments, —X—R^{L} is —N═C[N(R′)₂]₂. In some embodiments, each R′ is independently R. In some embodiments, R is optionally substituted C₁₋₆ aliphatic. In some embodiments, R is methyl. In some embodiments, —X—R^{L} is

[chemical structure]

In some embodiments, one R′ on a nitrogen atom is taken with a R′ on the other nitrogen to form a ring as described herein.

[0509] In some embodiments, —X—R^{L} is

[chemical structure]

wherein R¹ and R² are independently R′. In some embodiments, —X—R^{L} is

[chemical structure]

In some embodiments, —X—R^{L} is

[chemical structure]

In some embodiments, two R′ on the same nitrogen are taken together to form a ring as described herein. In some embodiments, —X—R^{L} is

[chemical structure]

In some embodiments, —X—R^{L} is

[chemical structure]

In some embodiments, —X—R^{L} is

[chemical structure]

In some embodiments, —X—R^{L} is

[chemical structure]

In some embodiments, —X—R^{L} is

[chemical structure]

In some embodiments, —X—R^{L} is

[chemical structure]

In some embodiments, —X—R^{L} is

[chemical structure]

In some embodiments, —X—R^{L} is

[chemical structure]

In some embodiments, —X—R^{L}

[chemical structure]

[0510] In some embodiments, —X—R^{L} is R as described herein. In some embodiments, R is not hydrogen. In some embodiments, R is optionally substituted C₁₋₆ aliphatic. In some embodiments, R is optionally substituted C₁₋₆ alkyl. In some embodiments, R is methyl.

[0511] In some embodiments, —X—R^{L} is selected from Tables below. In some embodiments, X is as described herein. In some embodiments, R^{L} is as described herein. In some embodiments, a linkage has the structure of —Y—P^{L}(—X—R^{L})—Z—, wherein —X—R^{L} is selected from Tables below, and each other variable is independently as described herein. In some embodiments, a linkage has the structure of or comprises —P(OX—X—R^{L})—, wherein —X—R^{L} is selected from Tables below. In some embodiments, a linkage has the structure of or comprises —P(S)—X—R^{L})—, wherein —X—R^{L} is selected from Tables below. In some embodiments, a linkage has the structure of or comprises —P(—X—R^{L})—, wherein —X—R^{L} is selected from Tables below. In some embodiments, a linkage has the structure of or comprises —O—P(O)(—X—R^{L})—O—, wherein —X—R^{L} is selected from Tables below. In some embodiments, a linkage has the structure of or comprises —O—P(S)(—X—R^{L})—, wherein —X—R^{L} is selected from Tables below. In some embodiments, a linkage has the structure of or comprises —O—P(—X—R^{L})—O—, wherein —X—R^{L} is selected from Tables below. In some embodiments, a linkage has the structure of —O—P(O)(—X—R^{L})—, wherein —X—R^{L} is selected from Tables below. In some embodiments, a linkage has the structure of —O—P(S)(—X—R^{L})—O—, wherein —X—R^{L} is selected from Tables below. In some embodiments, a linkage has the structure of —O—P(—X—R^{L})—O—, wherein —X—R^{L} is selected from Tables below. In some embodiments, the Tables below, n is 0-20 or as described herein.

TABLE L-1
Certain useful moieties bonded to linkage phosphorus (e.g., —X—R^{L}).

[chemical structure]

[chemical structure]

[chemical structure]

[chemical structure]

[chemical structure]

[chemical structure]

[chemical structure]

[chemical structure]

[chemical structure]

[chemical structure]

[chemical structure]

[chemical structure]

[chemical structure]

[chemical structure]

[chemical structure]

[chemical structure]

[chemical structure]

[chemical structure]

[chemical structure]

[chemical structure]

[chemical structure]

[chemical structure]

[chemical structure]

[chemical structure]

[chemical structure]

[chemical structure]

[chemical structure]

[chemical structure]

[chemical structure]

[chemical structure]

[chemical structure]

[chemical structure]

[chemical structure]

[chemical structure]

[chemical structure]

[chemical structure]

[chemical structure]

[chemical structure]

[chemical structure]

[chemical structure]

[chemical structure]

[chemical structure]

[chemical structure]

[chemical structure]

[chemical structure]

[chemical structure]

[chemical structure]

[chemical structure]

[chemical structure]

[chemical structure]

[chemical structure]

[chemical structure]

[chemical structure]

[chemical structure]

[chemical structure]

[chemical structure]

[chemical structure]

[chemical structure]

[chemical structure]

wherein each R^{LS} is independently R^{s}. In some embodiments, each R^{LS} is independently —Cl, —Br, —F, —N(Me)₂, or —NHCOCH₃.

TABLE L-2
Certain useful moieties bonded to linkage phosphorus (e.g., —X—R^{L}).

[chemical structure]

[chemical structure]

[chemical structure]

[chemical structure]

[chemical structure]

[chemical structure]

[chemical structure]

[chemical structure]

[chemical structure]

[chemical structure]

[chemical structure]

[chemical structure]

[chemical structure]

[chemical structure]

[chemical structure]

[chemical structure]

TABLE L-3
Certain useful moieties bonded to linkage phosphorus (e.g., —X—R^{L}).

[chemical structure]

[chemical structure]

[chemical structure]

TABLE L-4
Certain useful moieties bonded to linkage phosphorus (e.g., —X—R^{L}).

[chemical structure]

[chemical structure]

[chemical structure]

[chemical structure]

[chemical structure]

[chemical structure]

[chemical structure]

[chemical structure]

[chemical structure]

[chemical structure]

[chemical structure]

[chemical structure]

[chemical structure]

[chemical structure]

[chemical structure]

[chemical structure]

[chemical structure]

[chemical structure]

[chemical structure]

[chemical structure]

[chemical structure]

[chemical structure]

[chemical structure]

[chemical structure]

[chemical structure]

[chemical structure]

[chemical structure]

[chemical structure]

[chemical structure]

[chemical structure]

[chemical structure]

[chemical structure]

[chemical structure]

[chemical structure]

[chemical structure]

[chemical structure]

[chemical structure]

[chemical structure]

[chemical structure]

[chemical structure]

[chemical structure]

TABLE L-5
Certain useful moieties bonded to linkage phosphorus (e.g., —X—R^{L}).

[chemical structure]

[chemical structure]

[chemical structure]

[chemical structure]

[chemical structure]

[chemical structure]

[chemical structure]

[chemical structure]

[chemical structure]

[chemical structure]

[chemical structure]

[chemical structure]

[chemical structure]

[chemical structure]

[chemical structure]

[chemical structure]

[chemical structure]

[chemical structure]

[chemical structure]

[chemical structure]

[chemical structure]

[chemical structure]

[chemical structure]

[chemical structure]

[chemical structure]

[chemical structure]

[chemical structure]

[chemical structure]

[chemical structure]

[chemical structure]

[chemical structure]

[chemical structure]

[chemical structure]

[chemical structure]

[chemical structure]

[chemical structure]

[chemical structure]

[chemical structure]

[chemical structure]

[chemical structure]

[chemical structure]

[chemical structure]

[chemical structure]

[chemical structure]

[chemical structure]

[chemical structure]

[chemical structure]

[chemical structure]

[chemical structure]

[chemical structure]

[chemical structure]

[chemical structure]

[chemical structure]

[chemical structure]

[chemical structure]

TABLE L-6
Certain useful moieties bonded to linkage phosphorus (e.g., —X—R^{L}).

[chemical structure]

[chemical structure]

[chemical structure]

[chemical structure]

[chemical structure]

[chemical structure]

[chemical structure]

[chemical structure]

[chemical structure]

[chemical structure]

[chemical structure]

[chemical structure]

[chemical structure]

[chemical structure]

[chemical structure]

[0512] In some embodiments, an internucleotidic linkage, e.g., a non-negatively charged internucleotidic linkage or a neutral internucleotidic linkage, has the structure of -L^{L1}-Cy^{IL}-L^{L2}-. In some embodiments, L^{L1} is bonded to a 3′-carbon of a sugar. In some embodiments, L^{L2} is bonded to a 5′-carbon of a sugar. In some embodiments, L^{L1} is —O—CH₂—. In some embodiments, L^{L2} is a covalent bond. In some embodiments, L^{L2} is a —N(R′)—. In some embodiments, L^{L2} is a —NH—. In some embodiments, L^{L2} is bonded to a 5′-carbon of a sugar, which 5′-carbon is substituted with ═O. In some embodiments, Cy^{IL} is optionally substituted 3-10 membered saturated, partially unsaturated, or aromatic ring having 0-5 heteroatoms. In some embodiments, Cy^{IL} is an optionally substituted triazole ring. In some embodiments, Cy^{IL} is

[chemical structure]

In some embodiments, a linkage is

[chemical structure]

[0513] In some embodiments, a non-negatively charged internucleotidic linkage has the structure of —OP(═W)(—N(R′)₂)—O—.

[0514] In some embodiments, R′ is R. In some embodiments, R′ is H. In some embodiments, R′ is —C(O)R. In some embodiments, R′ is —C(O)OR. In some embodiments, R′ is —S(O)₂R

[0515] In some embodiments, R″ is —NHR′. In some embodiments, —N(R′)₂ is —NHR′.

[0516] As described herein, some embodiments, R is H. In some embodiments, R is optionally substituted C₁₋₆ aliphatic. In some embodiments, R is optionally substituted C₁₋₆ alkyl. In some embodiments, R is methyl. In some embodiments, R is substituted methyl. In some embodiments, R is ethyl. In some embodiments, R is substituted ethyl.

[0517] In some embodiments, as described herein, a non-negatively charged internucleotidic linkage is a neutral internucleotidic linkage.

[0518] In some embodiments, a modified internucleotidic linkage (e.g., a non-negatively charged internucleotidic linkage) comprises optionally substituted triazolyl. In some embodiments, R′ is or comprises optionally substituted triazolyl. In some embodiments, a modified internucleotidic linkage (e.g., a non-negatively charged internucleotidic linkage) comprises optionally substituted alkynyl. In some embodiments, R′ is optionally substituted alkynyl. In some embodiments, R′ comprises an optionally substituted triple bond. In some embodiments, a modified internucleotidic linkage comprises a triazole or alkyne moiety. In some embodiments, R′ is or comprises an optionally substituted triazole or alkyne moiety. In some embodiments, a triazole moiety, e.g., a triazolyl group, is optionally substituted. In some embodiments, a triazole moiety, e.g., a triazolyl group) is substituted. In some embodiments, a triazole moiety is unsubstituted. In some embodiments, a modified internucleotidic linkage comprises an optionally substituted guanidine moiety. In some embodiments, a modified internucleotidic linkage comprises an optionally substituted cyclic guanidine moiety. In some embodiments, R′, R^{L}, or —X—R^{L}, is or comprises an optionally substituted guanidine moiety. In some embodiments, R′, R^{L}, or —X—R^{L}, is or comprises an optionally substituted cyclic guanidine moiety. In some embodiments, R′, R^{L}, or —X—R^{L} comprises an optionally substituted cyclic guanidine moiety and an internucleotidic linkage has the structure of:

[chemical structure]

wherein W is O or S. In some embodiments, W is O. In some embodiments, W is S. In some embodiments, anon-negatively charged internucleotidic linkage is stereochemically controlled.

[0519] In some embodiments, a non-negatively charged internucleotidic linkage or a neutral internucleotidic linkage is an internucleotidic linkage comprising a triazole moiety. In some embodiments, a non-negatively charged internucleotidic linkage or a non-negatively charged internucleotidic linkage comprises an optionally substituted triazolyl group. In some embodiments, an internucleotidic linkage comprising a triazole moiety (e.g., an optionally substituted triazolyl group) has the structure of

[chemical structure]

In some embodiments, an internucleotidic linkage comprising a triazole moiety has the structure of

[chemical structure]

In some embodiments, an internucleotidic linkage, e.g., a non-negatively charged internucleotidic linkage, a neutral internucleotidic linkage, comprises a cyclic guanidine moiety. In some embodiments, an internucleotidic linkage comprising a cyclic guanidine moiety has the structure of

[chemical structure]

In some embodiments, a non-negatively charged internucleotidic linkage, or a neutral internucleotidic linkage, is or comprising a structure selected from

[chemical structure]

wherein W is O or S.

[0520] In some embodiments, an internucleotidic linkage comprises a Tmg group

[chemical structure]

In some embodiments, an internucleotidic linkage comprises a Tmg group and has the structure of

[chemical structure]

(the “Tmg internucleotidic linkage”). In some embodiments, neutral internucleotidic linkages include internucleotidic linkages of PNA and PMO, and an Tmg internucleotidic linkage.

[0521] In some embodiments, a non-negatively charged internucleotidic linkage comprises an optionally substituted 3-20 membered heterocyclyl or heteroaryl group having 1-10 heteroatoms. In some embodiments, a non-negatively charged internucleotidic linkage comprises an optionally substituted 3-20 membered heterocyclyl or heteroaryl group having 1-heteroatoms, wherein at least one heteroatom is nitrogen. In some embodiments, such a heterocyclyl or heteroaryl group is of a 5-membered ring. In some embodiments, such a heterocyclyl or heteroaryl group is of a 6-membered ring.

[0522] In some embodiments, a non-negatively charged internucleotidic linkage comprises an optionally substituted 5-20 membered heteroaryl group having 1-10 heteroatoms. In some embodiments, a non-negatively charged internucleotidic linkage comprises an optionally substituted 5-20 membered heteroaryl group having 1-10 heteroatoms, wherein at least one heteroatom is nitrogen. In some embodiments, a non-negatively charged internucleotidic linkage comprises an optionally substituted 5-6 membered heteroaryl group having 1-4 heteroatoms, wherein at least one heteroatom is nitrogen. In some embodiments, a non-negatively charged internucleotidic linkage comprises an optionally substituted 5-membered heteroaryl group having 1-4 heteroatoms, wherein at least one heteroatom is nitrogen. In some embodiments, a heteroaryl group is directly bonded to a linkage phosphorus. In some embodiments, a non-negatively charged internucleotidic linkage comprises an optionally substituted 5-20 membered heterocyclyl group having 1-10 heteroatoms. In some embodiments, a non-negatively charged internucleotidic linkage comprises an optionally substituted 5-20 membered heterocyclyl group having 1-10 heteroatoms, wherein at least one heteroatom is nitrogen. In some embodiments, a non-negatively charged internucleotidic linkage comprises an optionally substituted 5-6 membered heterocyclyl group having 1-4 heteroatoms, wherein at least one heteroatom is nitrogen. In some embodiments, a non-negatively charged internucleotidic linkage comprises an optionally substituted 5-membered heterocyclyl group having 1-4 heteroatoms, wherein at least one heteroatom is nitrogen. In some embodiments, at least two heteroatoms are nitrogen. In some embodiments, a heterocyclyl group is directly bonded to a linkage phosphorus. In some embodiments, a heterocyclyl group is bonded to a linkage phosphorus through a linker, e.g., ═N— when the heterocyclyl group is part of a guanidine moiety who directed bonded to a linkage phosphorus through its ═N—. In some embodiments, a non-negatively charged internucleotidic linkage comprises an optionally substituted

[chemical structure]

group. In some embodiments, a non-negatively charged internucleotidic linkage comprises an substituted

[chemical structure]

group. In some embodiments, a non-negatively charged internucleotidic linkage comprises a

[chemical structure]

group. In some embodiments, each R¹ is independently optionally substituted C₁₋₆ alkyl. In some embodiments, each R¹ is independently methyl.

[0523] In some embodiments, a non-negatively charged internucleotidic linkage, e.g., a neutral internucleotidic linkage is not chirally controlled. In some embodiments, a non-negatively charged internucleotidic linkage is chirally controlled. In some embodiments, a non-negatively charged internucleotidic linkage is chirally controlled and its linkage phosphorus is Rp. In some embodiments, a non-negatively charged internucleotidic linkage is chirally controlled and its linkage phosphorus is Sp.

[0524] In some embodiments, an internucleotidic linkage comprises no linkage phosphorus. In some embodiments, an internucleotidic linkage has the structure of —C(O)—(O)— or —C(O)—N(R′)—, wherein R′ is as described herein. In some embodiments, an internucleotidic linkage has the structure of —C(O)—(O)—. In some embodiments, an internucleotidic linkage has the structure of —C(O)—N(R′)—, wherein R′ is as described herein. In various embodiments, —C(O)— is bonded to nitrogen. In some embodiments, an internucleotidic linkage is or comprises —C(O)—O— which is part of a carbamate moiety. In some embodiments, an internucleotidic linkage is or comprises —C(O)—O— which is part of a urea moiety.

[0525] In some embodiments, an oligonucleotide comprises 1-20, 1-15, 1-10, 1-5, or 1, 2, 3, 4, 5, 6, 7, 8, 9, 10, or more non-negatively charged internucleotidic linkages. In some embodiments, an oligonucleotide comprises 1-20, 1-15, 1-10, 1-5, or 1, 2, 3, 4, 5, 6, 7, 8, 9, 10, or more neutral internucleotidic linkages. In some embodiments, each of non-negatively charged internucleotidic linkage and/or neutral internucleotidic linkages is optionally and independently chirally controlled. In some embodiments, each non-negatively charged internucleotidic linkage in an oligonucleotide is independently a chirally controlled internucleotidic linkage. In some embodiments, each neutral internucleotidic linkage in an oligonucleotide is independently a chirally controlled internucleotidic linkage. In some embodiments, at least one non-negatively charged internucleotidic linkage/neutral internucleotidic linkage has the structure of

[chemical structure]

In some embodiments, an oligonucleotide comprises at least one non-negatively charged internucleotidic linkage wherein its linkage phosphorus is in Rp configuration, and at least one non-negatively charged internucleotidic linkage wherein its linkage phosphorus is in Sp configuration.

[0526] In many embodiments, as demonstrated extensively, oligonucleotides of the present disclosure comprise two or more different internucleotidic linkages. In some embodiments, an oligonucleotide comprises a phosphorothioate internucleotidic linkage and a non-negatively charged internucleotidic linkage. In some embodiments, an oligonucleotide comprises a phosphorothioate internucleotidic linkage, a non-negatively charged internucleotidic linkage, and a natural phosphate linkage. In some embodiments, a non-negatively charged internucleotidic linkage is a neutral internucleotidic linkage. In some embodiments, a non-negatively charged internucleotidic linkage is n001, n003, n004, n006, n008 or n009, n013, n020, n021, n025, n026, n029, n031, n037, n046, n047, n048, n054, or n055). In some embodiments, a non-negatively charged internucleotidic linkage is n001. In some embodiments, each phosphorothioate internucleotidic linkage is independently chirally controlled. In some embodiments, each chiral modified internucleotidic linkage is independently chirally controlled. In some embodiments, one or more non-negatively charged internucleotidic linkage are not chirally controlled.

[0527] A typical connection, as in natural DNA and RNA, is that an internucleotidic linkage forms bonds with two sugars (which can be either unmodified or modified as described herein). In many embodiments, as exemplified herein an internucleotidic linkage forms bonds through its oxygen atoms or heteroatoms with one optionally modified ribose or deoxyribose at its 5′ carbon, and the other optionally modified ribose or deoxyribose at its 3′ carbon. In some embodiments, internucleotidic linkages connect sugars that are not ribose sugars, e.g., sugars comprising N ring atoms and acyclic sugars as described herein.

[0528] In some embodiments, each nucleoside units connected by an internucleotidic linkage independently comprises a nucleobase which is independently an optionally substituted A, T, C, G, or U, or an optionally substituted tautomer of A, T, C, G or U.

[0529] In some embodiments, an oligonucleotide comprises a modified internucleotidic linkage (e.g., a modified internucleotidic linkage having the structure of Formula I, I-a, I-b, or I-c, I-n-1, I-n-2, I-n-3, I-n-4, II, II-a-1, II-a-2, II-b-1, II-b-2, II-c-1, II-c-2, II-d-1, II-d-2, etc., or a salt form thereof) as described in U.S. Pat. Nos. 9,394,333, 9,744,183, 9,605,019, 9,598,458, 9,982,257, U.S. Ser. No. 10/160,969, U.S. Ser. No. 10/479,995, US 2020/0056173, US 2018/0216107, US 2019/0127733, U.S. Ser. No. 10/450,568, US 2019/0077817, US 2019/0249173, US 2019/0375774, WO 2018/223056, WO 2018/223073, WO 2018/223081, WO 2018/237194, WO 2019/032607, WO 2019/055951, WO 2019/075357, WO 2019/200185, WO 2019/217784, and/or WO 2019/032612 the internucleotidic linkages (e.g., those of Formula I, I-a, I-b, or I-c, I-n-1, I-n-2, I-n-3, I-n-4, II, II-a-1, II-a-2, II-b-1, II-b-2, II-c-1, II-c-2, II-d-1, II-d-2, etc.) of each of which are independently incorporated herein by reference. In some embodiments, a modified internucleotidic linkage is a non-negatively charged internucleotidic linkage. In some embodiments, provided oligonucleotides comprise one or more non-negatively charged internucleotidic linkages. In some embodiments, a non-negatively charged internucleotidic linkage is a positively charged internucleotidic linkage. In some embodiments, a non-negatively charged internucleotidic linkage is a neutral internucleotidic linkage. In some embodiments, the present disclosure provides oligonucleotides comprising one or more neutral internucleotidic linkages. In some embodiments, a non-negatively charged internucleotidic linkage or a neutral internucleotidic linkage (e.g., one of Formula I-n-1, I-n-2, I-n-3, I-n-4, II, II-a-1, II-a-2, II-b-1, II-b-2, II-c-1, II-c-2, II-d-1, II-d-2, etc.) is as described in U.S. Pat. Nos. 9,394,333, 9,744,183, 9,605,019, 9,598,458, 9,982,257, U.S. Ser. No. 10/160,969, U.S. Ser. No. 10/479,995, US 2020/0056173, US 2018/0216107, US 2019/0127733, U.S. Ser. No. 10/450,568, US 2019/0077817, US 2019/0249173, US 2019/0375774, WO 2018/223056, WO 2018/223073, WO 2018/223081, WO 2018/237194, WO 2019/032607, WO 2019/055951, WO 2019/075357, WO 2019/200185, WO 2019/217784, and/or WO 2019/032612. In some embodiments, a non-negatively charged internucleotidic linkage or neutral internucleotidic linkage is one of Formula I-n-1, I-n-2, I-n-3, I-n-4, II, II-a-1, II-a-2, II-b-1, II-b-2, II-c-1, II-c-2, II-d-1, II-d-2, etc. as described in WO 2018/223056, WO 2019/032607, WO 2019/075357, WO 2019/032607, WO 2019/075357, WO 2019/200185, WO 2019/217784, and/or WO 2019/032612, such internucleotidic linkages of each of which are independently incorporated herein by reference.

[0530] As described herein, various variables can be R, e.g., R′, R^{L}, etc. Various embodiments for R are described in the present disclosure (e.g., when describing variables that can be R). Such embodiments are generally useful for all variables that can be R. In some embodiments, R is hydrogen. In some embodiments, R is optionally substituted C₁₋₃₀ (e.g., 1, 2, 3, 4, 5, 6, 7, 8, 9, 10, 11, 12, 13, 14, 15, 16, 17, 18, 19, 20, 21, 22, 23, 24, 25, 26, 27, 28, 29 or 30) aliphatic. In some embodiments, R is optionally substituted C₁₋₂₀ aliphatic. In some embodiments, R is optionally substituted C₁₋₁₀ aliphatic. In some embodiments, R is optionally substituted C₁₋₆ aliphatic. In some embodiments, R is optionally substituted alkyl. In some embodiments, R is optionally substituted C₁₋₆ alkyl. In some embodiments, R is optionally substituted methyl. In some embodiments, R is methyl. In some embodiments, R is optionally substituted ethyl. In some embodiments, R is optionally substituted propyl. In some embodiments, R is isopropyl. In some embodiments, R is optionally substituted butyl. In some embodiments, R is optionally substituted pentyl. In some embodiments, R is optionally substituted hexyl.

[0531] In some embodiments, R is optionally substituted 3-30 membered (e.g., 3, 4, 5, 6, 7, 8, 9, 10, 11, 12, 13, 14, 15, 16, 17, 18, 19, 20, 21, 22, 23, 24, 25, 26, 27, 28, 29 or 30) cycloaliphatic. In some embodiments, R is optionally substituted cycloalkyl. In some embodiments, cycloaliphatic is monocyclic, bicyclic, or polycyclic, wherein each monocyclic unit is independently saturated or partially saturated. In some embodiments, R is optionally substituted cyclopropyl. In some embodiments, R is optionally substituted cyclobutyl. In some embodiments, R is optionally substituted cyclopentyl. In some embodiments, R is optionally substituted cyclohexyl. In some embodiments, R is optionally substituted adamantyl.

[0532] In some embodiments, R is optionally substituted C₁₋₃₀ (e.g., 1, 2, 3, 4, 5, 6, 7, 8, 9, 10, 11, 12, 13, 14, 15, 16, 17, 18, 19, 20, 21, 22, 23, 24, 25, 26, 27, 28, 29 or 30) heteroaliphatic having 1-10 heteroatoms. In some embodiments, R is optionally substituted C₁₋₂₀ aliphatic having 1-10 heteroatoms. In some embodiments, R is optionally substituted C₁₋₁₀ aliphatic having 1-10 heteroatoms. In some embodiments, R is optionally substituted C₁₋₆ aliphatic having 1-3 heteroatoms. In some embodiments, R is optionally substituted heteroalkyl. In some embodiments, R is optionally substituted C₁₋₆ heteroalkyl. In some embodiments, R is optionally substituted 3-30 membered (e.g., 3, 4, 5, 6, 7, 8, 9, 10, 11, 12, 13, 14, 15, 16, 17, 18, 19, 20, 21, 22, 23, 24, 25, 26, 27, 28, 29 or 30) heterocycloaliphatic having 1-10 heteroatoms. In some embodiments, R is optionally substituted heteroclycloalkyl. In some embodiments, heterocycloaliphatic is monocyclic, bicyclic, or polycyclic, wherein each monocyclic unit is independently saturated or partially saturated.

[0533] In some embodiments, R is optionally substituted C₆₋₃₀ aryl. In some embodiments, R is optionally substituted phenyl. In some embodiments, R is optionally substituted phenyl. In some embodiments, R is C₆₋₁₄ aryl. In some embodiments, R is optionally substituted bicyclic aryl. In some embodiments, R is optionally substituted polycyclic aryl. In some embodiments, R is optionally substituted C₆₋₃₀ arylaliphatic. In some embodiments, R is C₆₋₃₀ arylheteroaliphatic having 1-10 heteroatoms.

[0534] In some embodiments, R is optionally substituted 5-30 (5, 6, 7, 8, 9, 10, 11, 12, 13, 14, 15, 16, 17, 18, 19, 20, 21, 22, 23, 24, 25, 26, 27, 28, 29 or 30) membered heteroaryl having 1-10 heteroatoms. In some embodiments, R is optionally substituted 5-20 membered heteroaryl having 1-10 heteroatoms. In some embodiments, R is optionally substituted 5-10 membered heteroaryl having 1-10 heteroatoms. In some embodiments, R is optionally substituted 5-membered heteroaryl having 1-5 heteroatoms. In some embodiments, R is optionally substituted 5-membered heteroaryl having 1-4 heteroatoms. In some embodiments, R is optionally substituted 5-membered heteroaryl having 1-3 heteroatoms. In some embodiments, R is optionally substituted 5-membered heteroaryl having 1-2 heteroatoms. In some embodiments, R is optionally substituted 5-membered heteroaryl having one heteroatom. In some embodiments, R is optionally substituted 6-membered heteroaryl having 1-5 heteroatoms. In some embodiments, R is optionally substituted 6-membered heteroaryl having 1-4 heteroatoms. In some embodiments, R is optionally substituted 6-membered heteroaryl having 1-3 heteroatoms. In some embodiments, R is optionally substituted 6-membered heteroaryl having 1-2 heteroatoms. In some embodiments, R is optionally substituted 6-membered heteroaryl having one heteroatom. In some embodiments, R is optionally substituted monocyclic heteroaryl. In some embodiments, R is optionally substituted bicyclic heteroaryl. In some embodiments, R is optionally substituted polycyclic heteroaryl. In some embodiments, a heteroatom is nitrogen.

[0535] In some embodiments, R is optionally substituted 2-pyridinyl. In some embodiments, R is optionally substituted 3-pyridinyl. In some embodiments, R is optionally substituted 4-pyridinyl. In some embodiments, R is optionally substituted

[chemical structure]

[0536] In some embodiments, R is optionally substituted 3-30 (3, 4, 5, 6, 7, 8, 9, 10, 11, 12, 13, 14, 15, 16, 17, 18, 19, 20, 21, 22, 23, 24, 25, 26, 27, 28, 29 or 30) membered heterocyclyl having 1-10 heteroatoms. In some embodiments, R is optionally substituted 3-membered heterocyclyl having 1-2 heteroatoms. In some embodiments, R is optionally substituted 4-membered heterocyclyl having 1-2 heteroatoms. In some embodiments, R is optionally substituted 5-20 membered heterocyclyl having 1-10 heteroatoms. In some embodiments, R is optionally substituted 5-10 membered heterocyclyl having 1-10 heteroatoms. In some embodiments, R is optionally substituted 5-membered heterocyclyl having 1-5 heteroatoms. In some embodiments, R is optionally substituted 5-membered heterocyclyl having 1-4 heteroatoms. In some embodiments, R is optionally substituted 5-membered heterocyclyl having 1-3 heteroatoms. In some embodiments, R is optionally substituted 5-membered heterocyclyl having 1-2 heteroatoms. In some embodiments, R is optionally substituted 5-membered heterocyclyl having one heteroatom. In some embodiments, R is optionally substituted 6-membered heterocyclyl having 1-5 heteroatoms. In some embodiments, R is optionally substituted 6-membered heterocyclyl having 1-4 heteroatoms. In some embodiments, R is optionally substituted 6-membered heterocyclyl having 1-3 heteroatoms. In some embodiments, R is optionally substituted 6-membered heterocyclyl having 1-2 heteroatoms. In some embodiments, R is optionally substituted 6-membered heterocyclyl having one heteroatom. In some embodiments, R is optionally substituted monocyclic heterocyclyl. In some embodiments, R is optionally substituted bicyclic heterocyclyl. In some embodiments, R is optionally substituted polycyclic heterocyclyl. In some embodiments, R is optionally substituted saturated heterocyclyl. In some embodiments, R is optionally substituted partially unsaturated heterocyclyl. In some embodiments, a heteroatom is nitrogen. In some embodiments R is optionally substituted

[chemical structure]

In some embodiments, R is optionally substituted

[chemical structure]

In some embodiments, R is optionally substituted

[chemical structure]

[0537] In some embodiments, two k groups are optionally and independently taken together to form a covalent bond. In some embodiments, two or more R groups on the same atom are optionally and independently taken together with the atom to form an optionally substituted, 3-30 membered, monocyclic, bicyclic or polycyclic ring having, in addition to the atom, 0-10 heteroatoms. In some embodiments, two or more R groups on two or more atoms are optionally and independently taken together with their intervening atoms to form an optionally substituted, 3-30 membered, monocyclic, bicyclic or polycyclic ring having, in addition to the intervening atoms, 0-10 heteroatoms.

[0538] Various embodiments can comprise an optionally substituted ring, or can be taken together with their intervening atom(s) to form a ring. In some embodiments, a ring is 3-30 (e.g., 3, 4, 5, 6, 7, 8, 9, 10, 11, 12, 13, 14, 15, 16, 17, 18, 19, 20, 21, 22, 23, 24, 25, 26, 27, 28, 29 or 30) membered. In some embodiments, a ring is 3-20 membered. In some embodiments, a ring is 3-15 membered. In some embodiments, a ring is 3-10 membered. In some embodiments, a ring is 3-8 membered. In some embodiments, a ring is 3-7 membered. In some embodiments, a ring is 3-6 membered. In some embodiments, a ring is 4-20 membered. In some embodiments, a ring is 5-20 membered. In some embodiments, a ring is monocyclic. In some embodiments, a ring is bicyclic. In some embodiments, a ring is polycyclic. In some embodiments, each monocyclic ring or each monocyclic ring unit in bicyclic or polycyclic rings is independently saturated, partially saturated or aromatic. In some embodiments, each monocyclic ring or each monocyclic ring unit in bicyclic or polycyclic rings is independently 3-10 membered and has 0-5 heteroatoms.

[0539] In some embodiments, each heteroatom is independently selected oxygen, nitrogen, sulfur, silicon, and phosphorus. In some embodiments, each heteroatom is independently selected oxygen, nitrogen, sulfur, and phosphorus. In some embodiments, each heteroatom is independently selected oxygen, nitrogen, and sulfur. In some embodiments, a heteroatom is in an oxidized form.

[0540] As appreciated by those skilled in the art, many other types of internucleotidic linkages may be utilized in accordance with the present disclosure, for example, those described in U.S. Pat. Nos. 3,687,808; 4,469,863; 4,476,301; 5,177,195; 5,023,243; 5,034,506; 5,166,315; 5,185,444; 5,188,897; 5,214,134; 5,216,141; 5,235,033; 5,264,423; 5,264,564; 5,276,019; 5,278,302; 5,286,717; 5,321,131; 5,399,676; 5,405,938; 5,405,939; 5,434,257; 5,453,496; 5,455,233; 5,466,677; 5,466,677; 5,470,967; 5,476,925; 5,489,677; 5,519,126; 5,536,821; 5,541,307; 5,541,316; 5,550,111; 5,561,225; 5,563,253; 5,571,799; 5,587,361; 5,596,086; 5,602,240; 5,608,046; 5,610,289; 5,618,704; 5,623,070; 5,625,050; 5,633,360; 5,64,562; 5,663,312; 5,677,437; 5,677,439; 6,160,109; 6,239,265; 6,028,188; 6,124,445; 6,169,170; 6,172,209; 6,277,603; 6,326,199; 6,346,614; 6,444,423; 6,531,590; 6,534,639; 6,608,035; 6,683,167; 6,858,715; 6,867,294; 6,878,805; 7,015,315; 7,041,816; 7,273,933; 7,321,029; or RE39464. In certain embodiments, a modified internucleotidic linkage is one described in U.S. Pat. No. 9,982,257, US 20170037399, US 20180216108, WO 2017192664, WO 2017015575, WO2017062862, WO 2018067973, WO 2017160741, WO 2017192679, WO 2017210647, WO 2018098264, PCT/US18/35687, PCT/US18/38835, or PCT/US18/51398, the nucleobases, sugars, internucleotidic linkages, chiral auxiliaries/reagents, and technologies for oligonucleotide synthesis (reagents, conditions, cycles, etc.) of each of which is independently incorporated herein by reference.

[0541] In certain embodiments, each internucleotidic linkage in a ds oligonucleotide is independently selected from a natural phosphate linkage, a phosphorothioate linkage, and a non-negatively charged internucleotidic linkage (e.g., n001). In certain embodiments, each internucleotidic linkage in a ds oligonucleotide is independently selected from a natural phosphate linkage, a phosphorothioate linkage, and a neutral internucleotidic linkage (e.g., n001).

[0542] In certain embodiments, a ds oligonucleotide comprises one or more nucleotides that independently comprise a phosphorus modification prone to “autorelease” under certain conditions. That is, under certain conditions, a particular phosphorus modification is designed such that it self-cleaves from the ds oligonucleotide to provide, e.g., a natural phosphate linkage. In certain embodiments, such a phosphorus modification has a structure of —O-L-R¹, wherein L is L^{B} as described herein, and R¹ is R′ as described herein. In certain embodiments, a phosphorus modification has a structure of —S-L-R¹, wherein each L and R¹ is independently as described in the present disclosure. Certain examples of such phosphorus modification groups can be found in U.S. Pat. No. 9,982,257. In certain embodiments, an autorelease group comprises a morpholino group. In certain embodiments, an autorelease group is characterized by the ability to deliver an agent to the internucleotidic phosphorus linker, which agent facilitates further modification of the phosphorus atom such as, e.g., desulfurization. In certain embodiments, the agent is water and the further modification is hydrolysis to form a natural phosphate linkage.

[0543] In certain embodiments, a ds oligonucleotide comprises one or more internucleotidic linkages that improve one or more pharmaceutical properties and/or activities of the oligonucleotide. It is well documented in the art that certain oligonucleotides are rapidly degraded by nucleases and exhibit poor cellular uptake through the cytoplasmic cell membrane (Poijarvi-Virta et al., Curr. Med. Chem. (2006), 13(28); 3441-65; Wagner et al., Med. Res. Rev. (2000), 20(6):417-51; Peyrottes et al., Mini Rev. Med. Chem. (2004), 4(4):395-408; Gosselin et al., (1996), 43(1):196-208; Bologna et al., (2002), Antisense & Nucleic Acid Drug Development 12:33-41). Vives et al. (Nucleic Acids Research (1999), 27(20):4071-76) reported that tert-butyl SATE pro-oligonucleotides displayed markedly increased cellular penetration compared to the parent oligonucleotide under certain conditions.

[0544] Double stranded oligonucleotides can comprise various number of natural phosphate linkages. In certain embodiments, 5% or more of the internucleotidic linkages of provided ds oligonucleotides are natural phosphate linkages. In certain embodiments, 10% or more of the internucleotidic linkages of provided ds oligonucleotides are natural phosphate linkages. In certain embodiments, 15% or more of the internucleotidic linkages of provided ds oligonucleotides are natural phosphate linkages. In certain embodiments, 20% or more of the internucleotidic linkages of provided ds oligonucleotides are natural phosphate linkages. In certain embodiments, 25% or more of the internucleotidic linkages of provided ds oligonucleotides are natural phosphate linkages. In certain embodiments, 30% or more of the internucleotidic linkages of provided ds oligonucleotides are natural phosphate linkages. In certain embodiments, 35% or more of the internucleotidic linkages of provided ds oligonucleotides are natural phosphate linkages. In certain embodiments, 40% or more of the internucleotidic linkages of provided ds oligonucleotides are natural phosphate linkages. In certain embodiments, provided ds oligonucleotides comprises 1, 2, 3, 4, 5, 6, 7, 8, 9, 10 or more natural phosphate linkages. In certain embodiments, provided ds oligonucleotides comprises 4, 5, 6, 7, 8, 9, 10 or more natural phosphate linkages. In certain embodiments, the number of natural phosphate linkages is 2. In certain embodiments, the number of natural phosphate linkages is 3. In certain embodiments, the number of natural phosphate linkages is 4. In certain embodiments, the number of natural phosphate linkages is 5. In certain embodiments, the number of natural phosphate linkages is 6. In certain embodiments, the number of natural phosphate linkages is 7. In certain embodiments, the number of natural phosphate linkages is 8. In certain embodiments, some or all of the natural phosphate linkages are consecutive.

[0545] In certain embodiments, the present disclosure demonstrates that, in at least some cases, Sp internucleotidic linkages, among other things, at the 5′- and/or 3′-end can improve ds oligonucleotide stability. In certain embodiments, the present disclosure demonstrates that, among other things, natural phosphate linkages and/or Rp internucleotidic linkages may improve removal of ds oligonucleotides from a system. As appreciated by a person having ordinary skill in the art, various assays known in the art can be utilized to assess such properties in accordance with the present disclosure.

[0546] In certain embodiments, each phosphorothioate internucleotidic linkage in a ds oligonucleotide or a portion thereof (e.g., a domain, a subdomain, etc.) is independently chirally controlled. In certain embodiments, each is independently Sp or Rp. In certain embodiments, a high level is Sp as described herein. In certain embodiments, each phosphorothioate internucleotidic linkage in a ds oligonucleotide or a portion thereof is chirally controlled and is Sp. In certain embodiments, one or more, e.g., about 1-5 (e.g., about 1, 2, 3, 4, or 5) is Rp.

[0547] In certain embodiments, as illustrated in certain examples, a ds oligonucleotide or a portion thereof comprises one or more non-negatively charged internucleotidic linkages, each of which is optionally and independently chirally controlled. In certain embodiments, each non-negatively charged internucleotidic linkage is independently n001. In certain embodiments, a chiral non-negatively charged internucleotidic linkage is not chirally controlled. In certain embodiments, each chiral non-negatively charged internucleotidic linkage is not chirally controlled. In certain embodiments, a chiral non-negatively charged internucleotidic linkage is chirally controlled. In certain embodiments, a chiral non-negatively charged internucleotidic linkage is chirally controlled and is Rp. In certain embodiments, a chiral non-negatively charged internucleotidic linkage is chirally controlled and is Sp. In certain embodiments, each chiral non-negatively charged internucleotidic linkage is chirally controlled. In certain embodiments, the number of non-negatively charged internucleotidic linkages in a ds oligonucleotide or a portion thereof is about 1-10, or about 1, 2, 3, 4, 5, 6, 7, 8, 9, or 10. In certain embodiments, it is about 1. In certain embodiments, it is about 2. In certain embodiments, it is about 3. In certain embodiments, it is about 4. In certain embodiments, it is about 5. In certain embodiments, it is about 6. In certain embodiments, it is about 7. In certain embodiments, it is about 8. In certain embodiments, it is about 9. In certain embodiments, it is about 10. In certain embodiments, two or more non-negatively charged internucleotidic linkages are consecutive. In certain embodiments, no two non-negatively charged internucleotidic linkages are consecutive. In certain embodiments, all non-negatively charged internucleotidic linkages in a ds oligonucleotide or a portion thereof are consecutive (e.g., 3 consecutive non-negatively charged internucleotidic linkages). In certain embodiments, a non-negatively charged internucleotidic linkage, or two or more (e.g., about 2, about 3, about 4 etc.) consecutive non-negatively charged internucleotidic linkages, are at the 3′-end of a ds oligonucleotide or a portion thereof. In certain embodiments, the last two or three or four internucleotidic linkages of a ds oligonucleotide or a portion thereof comprise at least one internucleotidic linkage that is not a non-negatively charged internucleotidic linkage.

[0548] In certain embodiments, the last two or three or four internucleotidic linkages of a ds oligonucleotide or a portion thereof comprise at least one internucleotidic linkage that is not n001. In certain embodiments, the internucleotidic linkage linking the first two nucleosides of a ds oligonucleotide or a portion thereof is a non-negatively charged internucleotidic linkage.

[0549] In certain embodiments, the internucleotidic linkage linking the last two nucleosides of a ds oligonucleotide or a portion thereof is a non-negatively charged internucleotidic linkage. In certain embodiments, the internucleotidic linkage linking the first two nucleosides of a ds oligonucleotide or a portion thereof is a phosphorothioate internucleotidic linkage. In certain embodiments, it is Sp. In certain embodiments, the internucleotidic linkage linking the last two nucleosides of a ds oligonucleotide or a portion thereof is a phosphorothioate internucleotidic linkage. In certain embodiments, it is Sp.

[0550] In certain embodiments, one or more chiral internucleotidic linkages are chirally controlled and one or more chiral internucleotidic linkages are not chirally controlled. In certain embodiments, each phosphorothioate internucleotidic linkage is independently chirally controlled, and one or more non-negatively charged internucleotidic linkage are not chirally controlled. In certain embodiments, each phosphorothioate internucleotidic linkage is independently chirally controlled, and each non-negatively charged internucleotidic linkage is not chirally controlled. In certain embodiments, the internucleotidic linkage between the first two nucleosides of a ds oligonucleotide is a non-negatively charged internucleotidic linkage.

[0551] In certain embodiments, the internucleotidic linkage between the last two nucleosides are each independently a non-negatively charged internucleotidic linkage. In certain embodiments, both are independently non-negatively charged internucleotidic linkages. In certain embodiments, each non-negatively charged internucleotidic linkage is independently neutral internucleotidic linkage. In certain embodiments, each non-negatively charged internucleotidic linkage is independently n001.

[0552] In certain embodiments, a controlled level of ds oligonucleotides in a composition are desired ds oligonucleotides. In certain embodiments, of all ds oligonucleotides in a composition that share a common base sequence (e.g., a desired sequence for a purpose), or of all ds oligonucleotides in a composition, level of desired ds oligonucleotides (which may exist in various forms (e.g., salt forms) and typically differ only at non-chirally controlled internucleotidic linkages (various forms of the same stereoisomer can be considered the same for this purpose)) is about 5%-100%, 10%-100%, 20%-100%, 30%-100%, 40%-100%, 50%-100%, 60%-100%, 70%-100%, 80-100%, 90-100%, 95-100%, 50%-90%, about 5%, 10%, 15%, 20%, 25%, 30%, 35%, 40%, 45%, 50%, 55%, 60%, 65%, 70%, 75%, 80%, 85%, 90%, 95%, or 100%, or at least 5%, 10%, 15%, 20%, 25%, 30%, 35%, 40%, 45%, 50%, 55%, 60%, 65%, 70%, 75%, 80%, 85%, 90%, 95%, or 99%. In certain embodiments, a level is at least about 50%. In certain embodiments, a level is at least about 60%. In certain embodiments, a level is at least about 70%. In certain embodiments, a level is at least about 75%. In certain embodiments, a level is at least about 80%. In certain embodiments, a level is at least about 85%. In certain embodiments, a level is at least about 90%. In certain embodiments, a level is or is at least (DS)^{nc}, wherein DS is about 90%, 91%, 92%, 93%, 94%, 95%, 96%, 97%, 98%, 99% or 99.5% and nc is the number of chirally controlled internucleotidic linkages as described in the present disclosure (e.g., 1-50, 1-40, 1-30, 1-25, 1-20, 5-50, 5-40, 5-30, 5-25, 5-20, 1, 2, 3, 4, 5, 6, 7, 8, 9, 10, 11, 12, 13, 14, 15, 16, 17, 18, 19, 20, 21, 22, 23, 24, 25 or more). In certain embodiments, a level is or is at least (DS)^{nc}, wherein DS is 95%-100%.

[0553] Various types of internucleotidic linkages may be utilized in combination of other structural elements, e.g., sugars, to achieve desired ds oligonucleotide properties and/or activities. For example, the present disclosure routinely utilizes modified internucleotidic linkages and modified sugars, optionally with natural phosphate linkages and natural sugars, in designing ds oligonucleotides. In certain embodiments, the present disclosure provides a ds oligonucleotide comprising one or more modified sugars. In certain embodiments, the present disclosure provides a ds oligonucleotide comprising one or more modified sugars and one or more modified internucleotidic linkages, one or more of which are natural phosphate linkages.

### Double Stranded Oligonucleotide Compositions

[0554] Among other things, the present disclosure provides various ds oligonucleotide compositions. In some embodiments, the present disclosure provides ds oligonucleotide compositions of ds oligonucleotides described herein. In some embodiments, a ds oligonucleotide composition, e.g., a ds oligonucleotide targeting HSD17B13 composition, comprises a plurality of an oligonucleotide described in the present disclosure. In some embodiments, a ds oligonucleotide composition, e.g., a ds oligonucleotide targeting HSD17B13 composition, is chirally controlled. In some embodiments, a ds oligonucleotide composition, e.g., a ds oligonucleotide targeting HSD17B13 composition, is not chirally controlled (stereorandom).

[0555] Linkage phosphorus of natural phosphate linkages is achiral. Linkage phosphorus of many modified internucleotidic linkages, e.g., phosphorothioate internucleotidic linkages, are chiral. In some embodiments, during preparation of oligonucleotide compositions (e.g., in traditional phosphoramidite oligonucleotide synthesis), configurations of chiral linkage phosphorus are not purposefully designed or controlled, creating non-chirally controlled (stereorandom) oligonucleotide compositions (substantially racemic preparations) which are complex, random mixtures of various stereoisomers (diastereoisomers)—for oligonucleotides with n chiral internucleotidic linkages (linkage phosphorus being chiral), typically 2ⁿ stereoisomers (e.g., when n is 10, 2¹⁰=1,032; when n is 20, 2²⁰=1,048,576). These stereoisomers have the same constitution, but differ with respect to the pattern of stereochemistry of their linkage phosphorus.

[0556] In some embodiments, stereorandom oligonucleotide compositions have sufficient properties and/or activities for certain purposes and/or applications. In some embodiments, stereorandom oligonucleotide compositions can be cheaper, easier and/or simpler to produce than chirally controlled oligonucleotide compositions. However, stereoisomers within stereorandom compositions may have different properties, activities, and/or toxicities, resulting in inconsistent therapeutic effects and/or unintended side effects by stereorandom compositions, particularly compared to certain chirally controlled oligonucleotide compositions of oligonucleotides of the same constitution.

### Chirally Controlled Double Stranded Oligonucleotide Compositions

[0557] In some embodiments, the present disclosure encompasses technologies for designing and preparing chirally controlled ds oligonucleotide compositions. In some embodiments, a chirally controlled ds oligonucleotide composition comprises a controlled/pre-determined (not random as in stereorandom compositions) level of a plurality of ds oligonucleotides, wherein the ds oligonucleotides share the same linkage phosphorus stereochemistry at one or more chiral internucleotidic linkages (chirally controlled internucleotidic linkages). In some embodiments, ds oligonucleotides of a plurality share the same pattern of backbone chiral centers (stereochemistry of linkage phosphorus). In some embodiments, a pattern of backbone chiral centers is as described in the present disclosure. In some embodiments, ds oligonucleotides of a plurality share a common constitution. In some embodiments, they are structurally identical.

[0558] For example, in some embodiments, the present disclosure provides a ds oligonucleotide composition comprising a plurality of ds oligonucleotides, wherein oligonucleotides of the plurality share:
[0559] 1) a common base sequence, and
[0560] 2) the same linkage phosphorus stereochemistry independently at one or more (e.g., about 1-50, 1-40, 1-30, 1-25, 1-20, 1-15, 1-10, 5-50, 5-40, 5-30, 5-25, 5-20, 5-15, 5-10, 1, 2, 3, 4, 5, 6, 7, 8, 9, 10, 11, 12, 13, 14, 15, 16, 17, 18, 19, 20, 21, 22, 23, 24, or 25 or more) chiral internucleotidic linkages (“chirally controlled internucleotidic linkages”);
   wherein level of ds oligonucleotides of the plurality in the composition is non-random (e.g., controlled/pre-determined as described herein).

[0561] In some embodiments, the present disclosure provides a ds oligonucleotide composition comprising a plurality of oligonucleotides, wherein oligonucleotides of the plurality share:
[0562] 1) a common base sequence, and
[0563] 2) the same linkage phosphorus stereochemistry independently at one or more (e.g., about 1-50, 1-40, 1-30, 1-25, 1-20, 1-15, 1-10, 5-50, 5-40, 5-30, 5-25, 5-20, 5-15, 5-10, 1, 2, 3, 4, 5, 6, 7, 8, 9, 10, 11, 12, 13, 14, 15, 16, 17, 18, 19, 20, 21, 22, 23, 24, or 25 or more) chiral internucleotidic linkages (“chirally controlled internucleotidic linkages”);
[0564] wherein the composition is enriched relative to a substantially racemic preparation of oligonucleotides sharing the common base sequence for oligonucleotides of the plurality.

[0565] In some embodiments, the present disclosure provides a ds oligonucleotide composition comprising a plurality of ds oligonucleotides, wherein ds oligonucleotides of the plurality share:
[0566] 1) a common base sequence, and
[0567] 2) the same linkage phosphorus stereochemistry independently at one or more (e.g., about 1-50, 1-40, 1-30, 1-25, 1-20, 1-15, 1-10, 5-50, 5-40, 5-30, 5-25, 5-20, 5-15, 5-10, 1, 2, 3, 4, 5, 6, 7, 8, 9, 10, 11, 12, 13, 14, 15, 16, 17, 18, 19, 20, 21, 22, 23, 24, or 25 or more) chiral internucleotidic linkages (“chirally controlled internucleotidic linkages”);
[0568] wherein about 1%-100%, (e.g., about 5%-100%, 10%-100%, 20%-100%, 30%-100%, 40%-100%, 50%-100%, 60%-100%, 70%-100%, 80-100%, 90-100%, 95-100%, 50%-90%, or about 5%, 10%, 20%, 30%, 40%, 50%, 60%, 70%, 80%, 85%, 90%, 91%, 92%, 93%, 94%, 95%, 96%, 97%, 98%, 99%, or 100%, or at least 5%, 10%, 20%, 30%, 40%, 50%, 60%, 70%, 80%, 85%, 90%, 91%, 92%, 93%, 94%, 95%, 96%, 97%, 98%, or 99%) of all ds oligonucleotides in the composition that share the common base sequence are oligonucleotides of the plurality.

[0569] In some embodiments, the percentage/level of the ds oligonucleotides of a plurality is or is at least (DS)^{nc}, wherein DS is 90%-100%, and nc is the number of chirally controlled internucleotidic linkages. In some embodiments, nc is 5, 6, 7, 8, 9, 10 or more. In some embodiments, a percentage/level is at least 10%. In some embodiments, a percentage/level is at least 20%. In some embodiments, a percentage/level is at least 30%. In some embodiments, a percentage/level is at least 40%. In some embodiments, a percentage/level is at least 50%. In some embodiments, a percentage/level is at least 60%. In some embodiments, a percentage/level is at least 65%. In some embodiments, a percentage/level is at least 70%. In some embodiments, a percentage/level is at least 75%. In some embodiments, a percentage/level is at least 80%. In some embodiments, a percentage/level is at least 85%. In some embodiments, a percentage/level is at least 90%. In some embodiments, a percentage/level is at least 95%.

[0570] In some embodiments, ds oligonucleotides of a plurality share a common pattern of backbone linkages. In some embodiments, each ds oligonucleotide of a plurality independently has an internucleotidic linkage of a particular constitution (e.g., —O—P(O)(SH)—O—) or a salt form thereof (e.g., —O—P(O)(SNa)—O—) independently at each internucleotidic linkage site. In some embodiments, internucleotidic linkages at each internucleotidic linkage site are of the same form. In some embodiments, internucleotidic linkages at each internucleotidic linkage site are of different forms.

[0571] In some embodiments, ds oligonucleotides of a plurality share a common constitution. In some embodiments, ds oligonucleotides of a plurality are of the same form of a common constitution. In some embodiments, ds oligonucleotides of a plurality are of two or more forms of a common constitution. In some embodiments, ds oligonucleotides of a plurality are each independently of a particularly ds oligonucleotide or a pharmaceutically acceptable salt thereof, or of a ds oligonucleotide having the same constitution as the particularly ds oligonucleotide or a pharmaceutically acceptable salt thereof. In some embodiments, about 1%-100%, (e.g., about 5%-100%, 10%-100%, 20%-100%, 30%-100%, 40%-100%, 50%-100%, 60%-100%, 70%-100%, 80-100%, 90-100%, 95-100%, 50%-90%, or about 5%, 10%, 20%, 30%, 40%, 50%, 60%, 70%, 80%, 85%, 90%, 91%, 92%, 93%, 94%, 95%, 96%, 97%, 98%, 99%, or 100%, or at least 5%, 10%, 20%, 30%, 40%, 50%, 60%, 70%, 80%, 85%, 90%, 91%, 92%, 93%, 94%, 95%, 96%, 97%, 98%, or 99%) of all ds oligonucleotides in the composition that share a common constitution are oligonucleotides of the plurality. In some embodiments, a percentage of a level is or is at least (DS)^{nc}, wherein DS is 90%-100%, and nc is the number of chirally controlled internucleotidic linkages. In some embodiments, nc is 5, 6, 7, 8, 9, 10 or more. In some embodiments, a level is at least 10%. In some embodiments, a level is at least 20%. In some embodiments, a level is at least 30%. In some embodiments, a level is at least 40%. In some embodiments, a level is at least 50%. In some embodiments, a level is at least 60%. In some embodiments, a level is at least 65%. In some embodiments, a level is at least 70%. In some embodiments, a level is at least 75%. In some embodiments, a level is at least 80%. In some embodiments, a level is at least 85%. In some embodiments, a level is at least 90%. In some embodiments, a level is at least 95%.

[0572] In some embodiments, each phosphorothioate internucleotidic linkage is independently a chirally controlled internucleotidic linkage.

[0573] In some embodiments, the present disclosure provides a chirally controlled ds oligonucleotide composition comprising a plurality of oligonucleotides of a particular oligonucleotide type characterized by:
[0574] a) a common base sequence;
[0575] b) a common pattern of backbone linkages;
[0576] c) a common pattern of backbone chiral centers;
[0577] wherein the composition is enriched, relative to a substantially racemic preparation of ds oligonucleotides having the same common base sequence, for ds oligonucleotides of the particular ds oligonucleotide type.

[0578] In some embodiments, the present disclosure provides a chirally controlled ds oligonucleotide composition comprising a plurality of ds oligonucleotides of a particular ds oligonucleotide type characterized by:
[0579] a) a common base sequence;
[0580] b) a common pattern of backbone linkages;
[0581] c) a common pattern of backbone chiral centers;
[0582] wherein ds oligonucleotides of the plurality comprise at least one internucleotidic linkage comprising a common linkage phosphorus in the Sp configuration;
[0583] wherein the composition is enriched, relative to a substantially racemic preparation of oligonucleotides having the same common base sequence, for ds oligonucleotides of the particular ds oligonucleotide type.

[0584] Common patterns of backbone chiral centers, as appreciated by those skilled in the art, comprise at least one Rp or at least one Sp. Certain patterns of backbone chiral centers are illustrated in, e.g., Table 1.

[0585] In some embodiments, a chirally controlled ds oligonucleotide composition is enriched, relative to a substantially racemic preparation of ds oligonucleotides share the same common base sequence and a common pattern of backbone linkages, for oligonucleotides of the particular ds oligonucleotide type.

[0586] In some embodiments, ds oligonucleotides of a plurality, e.g., a particular ds oligonucleotide type, have a common pattern of backbone phosphorus modifications and a common pattern of nucleoside modifications. In some embodiments, ds oligonucleotides of a plurality have a common pattern of sugar modifications. In some embodiments, ds oligonucleotides of a plurality have a common pattern of base modifications. In some embodiments, ds oligonucleotides of a plurality have a common pattern of nucleoside modifications. In some embodiments, ds oligonucleotides of a plurality have the same constitution. In many embodiments, ds oligonucleotides of a plurality are identical. In some embodiments, ds oligonucleotides of a plurality are of the same oligonucleotide (as those skilled in the art will appreciate, such ds oligonucleotides may each independently exist in one of the various forms of the ds oligonucleotide, and may be the same, or different forms of the oligonucleotide). In some embodiments, ds oligonucleotides of a plurality are each independently of the same ds oligonucleotide or a pharmaceutically acceptable salt thereof.

[0587] In some embodiments, the present disclosure provides chirally controlled ds oligonucleotide compositions, e.g., of many ds oligonucleotides in Table 1 whose “stereochemistry/linkage” contain S and/or R. In some embodiments, ds oligonucleotides of a plurality are each independently a particular oligonucleotide in Table 1 whose “stereochemistry/linkage” contains S and/or R, optionally in various forms. In some embodiments, oligonucleotides of a plurality are each independently a particular oligonucleotide in Table 1 whose “stereochemistry/linkage” contains S and/or R, or a pharmaceutically acceptable salt thereof.

[0588] In some embodiments, level of a plurality of ds oligonucleotides in a composition can be determined as the product of the diastereopurity of each chirally controlled internucleotidic linkage in the oligonucleotides. In some embodiments, diastereopurity of an internucleotidic linkage connecting two nucleosides in an oligonucleotide (or nucleic acid) is represented by the diastereopurity of an internucleotidic linkage of a dimer connecting the same two nucleosides, wherein the dimer is prepared using comparable conditions, in some instances, identical synthetic cycle conditions.

[0589] In some embodiments, all chiral internucleotidic linkages are independently chiral controlled, and the composition is a completely chirally controlled oligonucleotide composition. In some embodiments, not all chiral internucleotidic linkages are chiral controlled internucleotidic linkages, and the composition is a partially chirally controlled oligonucleotide composition.

[0590] Oligonucleotides may comprise or consist of various patterns of backbone chiral centers (patterns of stereochemistry of chiral linkage phosphorus). Certain useful patterns of backbone chiral centers are described in the present disclosure. In some embodiments, a plurality of oligonucleotides share a common pattern of backbone chiral centers, which is or comprises a pattern described in the present disclosure (e.g., as in “Stereochemistry and Patterns of Backbone Chiral Centers”, a pattern of backbone chiral centers of a chirally controlled oligonucleotide in Table 1, etc.).

[0591] In some embodiments, a chirally controlled oligonucleotide composition is chirally pure (or stereopure, stereochemically pure) oligonucleotide composition, wherein the oligonucleotide composition comprises a plurality of oligonucleotides, wherein the oligonucleotides are independently of the same stereoisomer [including that each chiral element of the oligonucleotides, including each chiral linkage phosphorus, is independently defined (stereodefined)]. A chirally pure (or stereopure, stereochemically pure) oligonucleotide composition of an oligonucleotide stereoisomer does not contain other stereoisomers (as appreciated by those skilled in the art, one or more unintended stereoisomers may exist as impurities from, e.g., preparation, storage, etc.).

[0592] Chirally controlled oligonucleotide compositions can demonstrate a number of advantages over stereorandom oligonucleotide compositions. Among other things, chirally controlled oligonucleotide compositions are more uniform than corresponding stereorandom oligonucleotide compositions with respect to oligonucleotide structures. By controlling stereochemistry, compositions of individual stereoisomers can be prepared and assessed, so that chirally controlled oligonucleotide composition of stereoisomers with desired properties and/or activities can be developed. In some embodiments, chirally controlled oligonucleotide compositions provides better delivery, stability, clearance, activity, selectivity, and/or toxicity profiles compared to, e.g., corresponding stereorandom oligonucleotide compositions. In some embodiments, chirally controlled oligonucleotide compositions provide better efficacy, fewer side effects, and/or more convenient and effective dosage regimens. Among other things, patterns of backbone chiral centers as described herein can be utilized to provide controlled cleavage of oligonucleotide targets (e.g., transcripts such as pre-mRNA, mature mRNA, etc.; including control of cleavage sites, rate and/or extent of cleavage at cleavage sites, and/or overall rate and extent of cleavage, etc.).

[0593] In some embodiments, oligonucleotides in provided compositions, e.g., chirally controlled oligonucleotide compositions, are ds oligonucleotides targeting HSD17B13 as described herein.

[0594] In some embodiments, the present disclosure provides a stereorandom oligonucleotide composition, e.g., a stereorandom ds oligonucleotide targeting HSD17B13 composition. In some embodiments, the present disclosure provides a stereorandom ds oligonucleotide targeting HSD17B13 composition which is capable of decreasing the level, activity or expression of a HSD17B13 gene or a gene product thereof. In some embodiments, the present disclosure provides a stereorandom ds oligonucleotide targeting HSD17B13 composition which is capable of decreasing the level, activity or expression of a HSD17B13 gene or a gene product thereof, and wherein the base sequence of the ds oligonucleotides targeting HSD17B13 is, comprises, or comprises a span (e.g., at least 10 or 15 contiguous bases) of a base sequence disclosed herein (e.g., a base sequence in Table 1, wherein each T may be independently replaced with U and vice versa).

[0595] In some embodiments, an oligonucleotide composition comprises one or more internucleotidic linkages which are stereocontrolled (chirally controlled; in some embodiments, stereopure) and one or more internucleotidic linkages which are stereorandom. In some embodiments, a ds oligonucleotide targeting HSD17B13 composition comprises one or more internucleotidic linkages which are stereocontrolled (chirally controlled; in some embodiments, stereopure) and one or more internucleotidic linkages which are stereorandom. In some embodiments, an oligonucleotide composition comprises one or more internucleotidic linkages which are stereocontrolled (e.g., chirally controlled or stereopure) and one or more internucleotidic linkages which are stereorandom. Such oligonucleotides may target various targets and may have various base sequences, and may be capable of operating via one or more of various modalities (e.g., RNase H mechanism, steric hindrance, double- or single-stranded RNA interference, exon skipping modulation, CRISPR, aptamer, etc.).

[0596] In some embodiments, the present disclosure provides a chirally controlled oligonucleotide composition, e.g., chirally controlled ds oligonucleotide targeting HSD17B13 composition. In some embodiments, provided chirally controlled oligonucleotide compositions comprise a plurality of oligonucleotides, e.g., ds oligonucleotides targeting HSD17B13, of the same constitution, and have one or more internucleotidic linkages. In some embodiments, a plurality of oligonucleotides, e.g., in a chirally controlled oligonucleotide composition, is a plurality of an oligonucleotide selected from Table 1, wherein the oligonucleotide comprises at least one Rp or Sp linkage phosphorus in a chirally controlled internucleotidic linkage. In some embodiments, a plurality of oligonucleotides, e.g., in a chirally controlled oligonucleotide composition, is a plurality of an oligonucleotide selected from Table 1, wherein each phosphorothioate internucleotidic linkage in the oligonucleotide is independently chirally controlled (each phosphorothioate internucleotidic linkage is independently Rp or Sp). In some embodiments, an oligonucleotide composition, e.g., a ds oligonucleotide targeting HSD17B13 composition is a substantially pure preparation of a single oligonucleotide in that oligonucleotides in the composition that are not the single oligonucleotide are impurities from the preparation process of the single oligonucleotide, in some case, after certain purification procedures. In some embodiments, a single oligonucleotide is an oligonucleotide of Table 1, wherein each chiral internucleotidic linkage of the oligonucleotide is chirally controlled (e.g., indicated as S or R but not X in “Stereochemistry/Linkage”).

[0597] In some embodiments, a chirally controlled oligonucleotide composition can have, relative to a corresponding stereorandom oligonucleotide composition, increased activity and/or stability, increased delivery, and/or decreased ability to elicit adverse effects such as complement, TLR9 activation, etc. In some embodiments, a stereorandom (non-chirally controlled) oligonucleotide composition differs from a chirally controlled oligonucleotide composition in that its corresponding plurality of oligonucleotides do not contain any chirally controlled internucleotidic linkages but the stereorandom oligonucleotide composition is otherwise identical to the chirally controlled oligonucleotide composition.

[0598] In some embodiments, the present disclosure pertains to a chirally controlled ds oligonucleotide targeting HSD17B13 composition which is capable of decreasing the level, activity or expression of a HSD17B13 gene or a gene product thereof.

[0599] In some embodiments, the present disclosure provides a chirally controlled ds oligonucleotide targeting HSD17B13 composition which is capable of decreasing the level, activity or expression of a HSD17B13 gene or a gene product thereof, and comprises a plurality of oligonucleotides which share a common base sequence that is or comprises a base sequence disclosed herein (e.g., in Table 1, wherein each T may be independently replaced with U and vice versa).

[0600] In some embodiments, a provided chirally controlled oligonucleotide composition is a chirally controlled ds oligonucleotide targeting HSD17B13 composition comprising a plurality of ds oligonucleotides targeting HSD17B13. In some embodiments, a chirally controlled oligonucleotide composition is a chirally pure (or “stereochemically pure”) oligonucleotide composition. In some embodiments, the present disclosure provides a chirally pure oligonucleotide composition of an oligonucleotide in Table 1, wherein each chiral internucleotidic linkage of the oligonucleotide is independently chirally controlled (Rp or Sp, e.g., R or S but not X in “Stereochemistry/Linkage”). As one of ordinary skill in the art will understand, chemical selectivity rarely, if ever, achieves completeness (absolute 100%). In some embodiments, a chirally pure oligonucleotide composition comprises a plurality of oligonucleotides, wherein oligonucleotides of the plurality are structurally identical and all have the same structure (the same stereoisomeric form; in the context of oligonucleotide, typically the same diastereomeric form as typically multiple chiral centers exist in an oligonucleotide), and the chirally pure oligonucleotide composition does not contain any other stereoisomers (in the context of oligonucleotide, typically diastereomers as typically multiple chiral centers exist in an oligonucleotide; to the extent, e.g., achievable by stereoselective preparation). As appreciated by those skilled in the art, stereorandom (or “racemic”, “non-chirally controlled”) oligonucleotide compositions are random mixtures of many stereoisomers (e.g., 2ⁿ diastereoisomers wherein n is the number of chiral linkage phosphorus for oligonucleotides in which other chiral centers (e.g., carbon chiral centers in sugars) are chirally controlled each independently existing in one configuration and only chiral linkage phosphorus centers are not chirally controlled).

[0601] Certain data showing properties and/or activities of chirally controlled oligonucleotide composition, e.g., chirally controlled ds oligonucleotide targeting HSD17B13 compositions in decreasing the level, activity and/or expression of a HSD17B13 target gene or a gene product thereof, are shown in, for example, the Examples section of this document.

[0602] In some embodiments, the present disclosure provides an oligonucleotide composition comprising oligonucleotides that comprise at least one chiral linkage phosphorus. In some embodiments, the present disclosure provides a ds oligonucleotide targeting HSD17B13 composition comprising ds oligonucleotides targeting HSD17B13 that comprise at least one chiral linkage phosphorus. In some embodiments, the present disclosure provides a ds oligonucleotide targeting HSD17B13 composition in which the ds oligonucleotides targeting HSD17B13 comprise a chirally controlled phosphorothioate internucleotidic linkage, wherein the linkage phosphorus has a Rp configuration. In some embodiments, the present disclosure provides a ds oligonucleotide targeting HSD17B13 composition in which the ds oligonucleotides targeting HSD17B13 comprise a chirally controlled phosphorothioate internucleotidic linkage, wherein the linkage phosphorus has a Sp configuration.

[0603] In some embodiments, compared to reference oligonucleotide compositions, provided chirally controlled oligonucleotide compositions (e.g., chirally controlled ds oligonucleotide targeting HSD17B13 compositions) are surprisingly effective. In some embodiments, desired biological effects (e.g., as measured by decreased levels of mRNA, proteins, etc. whose levels are targeted for reduction) can be enhanced by more than 5, 10, 15, 20, 25, 30, 40, 50, or 100 fold (e.g., as measured by remaining levels of mRNA, proteins, etc.). In some embodiments, a change is measured by decrease of an undesired mRNA level compared to a reference condition. In some embodiments, a change is measured by increase of a desired mRNA level compared to a reference condition. In some embodiments, a change is measured by decrease of an undesired mRNA level compared to a reference condition. In some embodiments, a reference condition is absence of treatment, e.g., by a chirally controlled oligonucleotide composition. In some embodiments, a reference condition is a corresponding stereorandom composition of oligonucleotides having the same constitution.

[0604] In some embodiments, the present disclosure provides a chirally controlled oligonucleotide composition, e.g., a chirally controlled ds oligonucleotide targeting HSD17B13 composition, wherein the linkage phosphorus of at least one chirally controlled internucleotidic linkage is Sp. In some embodiments, the present disclosure provides a chirally controlled oligonucleotide composition, e.g., a chirally controlled ds oligonucleotide targeting HSD17B13 composition, wherein the majority of linkage phosphorus of chirally controlled internucleotidic linkages are Sp. In some embodiments, about 50%-100%, 55%-100%, 60%-100%, 65%-100%, 70%-100%, 75%-100%, 80%-100%, 85%-100%, 90%-100%, 55%-95%, 60%-95%, 65%-95%, or about 55%, 60%, 65%, 70%, 75%, 80%, 85%, 90%, 95%, 97%, 99% or more, of all chirally controlled phosphorothioate internucleotidic linkages are Sp. In some embodiments, about 50%-100%, 55%-100%, 60%-100%, 65%-100%, 70%-100%, 75%-100%, 80%-100%, 85%-100%, 90%-100%, 55%-95%, 60%-95%, 65%-95%, or about 55%, 60%, 65%, 70%, 75%, 80%, 85%, 90%, 95%, 97%, 99% or more, of all phosphorothioate internucleotidic linkages are chirally controlled and are Sp. In some embodiments, about 50%-100%, 55%-100%, 60%-100%, 65%-100%, 70%-100%, 75%-100%, 80%-100%, 85%-100%, 90%-100%, 55%-95%, 60%-95%, 65%-95%, or about 55%, 60%, 65%, 70%, 75%, 80%, 85%, 90%, 95%, 97%, 99% or more, of all chirally controlled internucleotidic linkages (or of all chiral internucleotidic linkages, or of all internucleotidic linkages) are Sp. In some embodiments, the present disclosure provides a chirally controlled oligonucleotide composition, e.g., a chirally controlled ds oligonucleotide targeting HSD17B13 composition, wherein the majority of chiral internucleotidic linkages are chirally controlled and are Sp at their linkage phosphorus. In some embodiments, the present disclosure provides a chirally controlled oligonucleotide composition, e.g., a chirally controlled ds oligonucleotide targeting HSD17B13 composition, wherein each chiral internucleotidic linkage is chirally controlled and each chiral linkage phosphorus is Sp. In some embodiments, the present disclosure provides a chirally controlled oligonucleotide composition, e.g., chirally controlled ds oligonucleotide targeting HSD17B13 composition, wherein at least one chirally controlled internucleotidic linkage has a Rp linkage phosphorus. In some embodiments, the present disclosure provides a chirally controlled oligonucleotide composition, e.g., a chirally controlled ds oligonucleotide targeting HSD17B13 composition, wherein at least one chirally controlled internucleotidic linkage comprises a Rp linkage phosphorus and at least one chirally controlled internucleotidic linkage comprises a Sp linkage phosphorus. In some embodiments, at least one phosphorothioate internucleotidic linkage is chirally controlled and Rp. In some embodiments, about 1-5, e.g., about 1, 2, 3, 4, or 5 phosphorothioate internucleotidic linkage is chirally controlled and Rp. In some embodiments, about 50%-100%, 55%-100%, 60%-100%, 65%-100%, 70%-100%, 75%-100%, 80%-100%, 85%-100%, 90%-100%, 55%-95%, 60%-95%, 65%-95%, or about 55%, 60%, 65%, 70%, 75%, 80%, 85%, 90%, 95%, 97%, 99% or more, of all chirally controlled non-negatively charged internucleotidic linkages (e.g., n001) are Rp. In some embodiments, each chirally controlled n001 is Rp.

### Stereochemistry and Patterns of Backbone Chiral Centers

[0605] In contrast to natural phosphate linkages, linkage phosphorus of chiral modified internucleotidic linkages, e.g., phosphorothioate internucleotidic linkages, are chiral. Among other things, the present disclosure provides technologies (e.g., oligonucleotides, compositions, methods, etc.) comprising control of stereochemistry of chiral linkage phosphorus in chiral internucleotidic linkages. In some embodiments, as demonstrated herein, control of stereochemistry can provide improved properties and/or activities, including desired stability, reduced toxicity, improved reduction of target nucleic acids, etc. In some embodiments, the present disclosure provides useful patterns of backbone chiral centers for oligonucleotides and/or regions thereof, which pattern is a combination of stereochemistry of each chiral linkage phosphorus (Rp or Sp) of chiral linkage phosphorus, indication of each achiral linkage phosphorus (Op, if any), etc. from 5′ to 3′. In some embodiments, patterns of backbone chiral centers can control cleavage patterns of target nucleic acids when they are contacted with provided oligonucleotides or compositions thereof in a cleavage system (e.g., in vitro assay, cells, tissues, organs, organisms, subjects, etc.). In some embodiments, patterns of backbone chiral centers improve cleavage efficiency and/or selectivity of target nucleic acids when they are contacted with provided oligonucleotides or compositions thereof in a cleavage system.

[0606] In some embodiments, a pattern of backbone chiral centers of an oligonucleotide or a region thereof comprises or is any (Np)n(Op)m, wherein Np is Rp or Sp, Op represents a linkage phosphorus being achiral (e.g., as for the linkage phosphorus of natural phosphate linkages), and each of n and m is independently as defined and described in the present disclosure. In some embodiments, a pattern of backbone chiral centers of an oligonucleotide or a region thereof comprises or is (Sp)n(Op)m, wherein each variable is independently as defined and described in the present disclosure. In some embodiments, a pattern of backbone chiral centers of an oligonucleotide or a region thereof comprises or is (Rp)n(Op)m, wherein each variable is independently as defined and described in the present disclosure. In some embodiments, n is 1. In some embodiments, a pattern of backbone chiral centers of an oligonucleotide or a region thereof comprises or is (Sp)(Op)m, wherein m is 1, 2, 3, 4, 5, 6, 7, 8, 9, or 10. In some embodiments, a pattern of backbone chiral centers of an oligonucleotide or a region thereof comprises or is (Rp)(Op)m, wherein m is 1, 2, 3, 4, 5, 6, 7, 8, 9, or 10. In some embodiments, the pattern of backbone chiral centers of a 5′-wing is or comprises (Np)n(Op)m. In some embodiments, the pattern of backbone chiral centers of a 5′-wing is or comprises (Sp)n(Op)m. In some embodiments, the pattern of backbone chiral centers of a 5′-wing is or comprises (Rp)n(Op)m. In some embodiments, the pattern of backbone chiral centers of a 5′-wing is or comprises (Sp)(Op)m. In some embodiments, the pattern of backbone chiral centers of a 5′-wing is or comprises (Rp)(Op)m. In some embodiments, the pattern of backbone chiral centers of a 5′-wing is (Sp)(Op)m. In some embodiments, the pattern of backbone chiral centers of a 5′-wing is (Rp)(Op)m. In some embodiments, the pattern of backbone chiral centers of a 5′-wing is (Sp)(Op)m, wherein Sp is the linkage phosphorus configuration of the first internucleotidic linkage of the oligonucleotide from the 5′-end. In some embodiments, the pattern of backbone chiral centers of a 5′-wing is (Rp)(Op)m, wherein Rp is the linkage phosphorus configuration of the first internucleotidic linkage of the oligonucleotide from the 5′-end. In some embodiments, as described in the present disclosure, m is 2; in some embodiments, m is 3; in some embodiments, m is 4; in some embodiments, m is 5; in some embodiments, m is 6.

[0607] In some embodiments, a pattern of backbone chiral centers of an oligonucleotide or a region thereof comprises or is (Op)m(Np)n, wherein Np is Rp or Sp, Op represents a linkage phosphorus being achiral (e.g., as for the linkage phosphorus of natural phosphate linkages), and each of n and m is independently as defined and described in the present disclosure. In some embodiments, a pattern of backbone chiral centers of an oligonucleotide or a region thereof comprises or is (Op)m(Sp)n, wherein each variable is independently as defined and described in the present disclosure. In some embodiments, a pattern of backbone chiral centers of an oligonucleotide or a region thereof comprises or is (Op)m(Rp)n, wherein each variable is independently as defined and described in the present disclosure. In some embodiments, n is 1. In some embodiments, a pattern of backbone chiral centers of an oligonucleotide or a region thereof comprises or is (Op)m(Sp), wherein m is 1, 2, 3, 4, 5, 6, 7, 8, 9, or 10. In some embodiments, a pattern of backbone chiral centers of an oligonucleotide or a region thereof comprises or is (Op)m(Rp), wherein m is 1, 2, 3, 4, 5, 6, 7, 8, 9, or 10. In some embodiments, the pattern of backbone chiral centers of a 3′-wing is or comprises (Op)m(Np)n. In some embodiments, the pattern of backbone chiral centers of a 3′-wing is or comprises (Op)m(Sp)n. In some embodiments, the pattern of backbone chiral centers of a 3′-wing is or comprises (Op)m(Rp)n. In some embodiments, the pattern of backbone chiral centers of a 3′-wing is or comprises (Op)m(Sp). In some embodiments, the pattern of backbone chiral centers of a 3′-wing is or comprises (Op)m(Rp). In some embodiments, the pattern of backbone chiral centers of a 3′-wing is (Op)m(Sp). In some embodiments, the pattern of backbone chiral centers of a 3′-wing is (Op)m(Rp). In some embodiments, the pattern of backbone chiral centers of a 3′-wing is (Op)m(Sp), wherein Sp is the linkage phosphorus configuration of the last internucleotidic linkage of the oligonucleotide from the 5′-end. In some embodiments, the pattern of backbone chiral centers of a 3′-wing is (Op)m(Rp), wherein Rp is the linkage phosphorus configuration of the last internucleotidic linkage of the oligonucleotide from the 5′-end. In some embodiments, as described in the present disclosure, m is 2; in some embodiments, m is 3; in some embodiments, m is 4; in some embodiments, m is 5; in some embodiments, m is 6.

[0608] In some embodiments, a pattern of backbone chiral centers of an oligonucleotide or a region thereof (e.g., a core) comprises or is (Sp)m(Rp/Op)n or (Rp/Op)n(Sp)m, wherein each variable is independently as described in the present disclosure. In some embodiments, a pattern of backbone chiral centers of an oligonucleotide or a region thereof (e.g., a core) comprises or is (Sp)m(Rp)n or (Rp)n(Sp)m, wherein each variable is independently as described in the present disclosure. In some embodiments, a pattern of backbone chiral centers of an oligonucleotide or a region thereof (e.g., a core) comprises or is (Sp)m(Op)n or (Op)n(Sp)m, wherein each variable is independently as described in the present disclosure. In some embodiments, a pattern of backbone chiral centers of an oligonucleotide or a region thereof (e.g., a core) comprises or is (Np)t[(Rp/Op)n(Sp)m]y or [(Rp/Op)n(Sp)m]y(Np)t, wherein y is 1-50, and each other variable is independently as described in the present disclosure. In some embodiments, a pattern of backbone chiral centers of an oligonucleotide or a region thereof (e.g., a core) comprises or is (Np)t[(Rp)n(Sp)m]y or [(Rp)n(Sp)m]y(Np)t, wherein each variable is independently as described in the present disclosure. In some embodiments, a pattern of backbone chiral centers of an oligonucleotide or a region thereof (e.g., a core) comprises or is [(Rp/Op)n(Sp)m]y(Rp)k, [(Rp/Op)n(Sp)m]y, (Sp)t[(Rp/Op)n(Sp)m]y, (Sp)t[(Rp/Op)n(Sp)m]y(Rp)k, wherein k is 1-50, and each other variable is independently as described in the present disclosure. In some embodiments, a pattern of backbone chiral centers of an oligonucleotide or a region thereof (e.g., a core) comprises or is [(Op)n(Sp)m]y(Rp)k, [(Op)n(Sp)m]y, (Sp)t[(Op)n(Sp)m]y, (Sp)t[(Op)n(Sp)m]y(Rp)k, wherein each variable is independently as described in the present disclosure. In some embodiments, a pattern of backbone chiral centers of an oligonucleotide or a region thereof (e.g., a core) comprises or is [(Rp)n(Sp)m]y(Rp)k, [(Rp)n(Sp)m]y, (Sp)t[(Rp)n(Sp)m]y, (Sp)t[(Rp)n(Sp)m]y(Rp)k, wherein each variable is independently as described in the present disclosure. In some embodiments, an oligonucleotide comprises a core region. In some embodiments, an oligonucleotide comprises a core region, wherein each sugar in the core region does not contain a 2′-OR′, wherein R¹ is as described in the present disclosure. In some embodiments, an oligonucleotide comprises a core region, wherein each sugar in the core region is independently a natural DNA sugar. In some embodiments, the pattern of backbone chiral centers of the core comprises or is (Rp)(Sp)m. In some embodiments, the pattern of backbone chiral centers of the core comprises or is (Op)(Sp)m. In some embodiments, the pattern of backbone chiral centers of the core comprises or is (Np)t[(Rp/Op)n(Sp)m]y or [(Rp/Op)n(Sp)m]y(Np)t. In some embodiments, the pattern of backbone chiral centers of the core comprises or is (Np)t[(Rp/Op)n(Sp)m]y or [(Rp/Op)n(Sp)m]y(Np)t. In some embodiments, the pattern of backbone chiral centers of the core comprises or is (Np)t[(Rp)n(Sp)m]y or [(Rp)n(Sp)m]y(Np)t. In some embodiments, the pattern of backbone chiral centers of a core comprises or is [(Rp/Op)n(Sp)m]y(Rp)k, [(Rp/Op)n(Sp)m]y, (Sp)t[(Rp/Op)n(Sp)m]y, (Sp)t[(Rp/Op)n(Sp)m]y(Rp)k. In some embodiments, a pattern of backbone chiral centers of a core comprises or is [(Op)n(Sp)m]y(Rp)k, [(Op)n(Sp)m]y, (Sp)t[(Op)n(Sp)m]y, (Sp)t[(Op)n(Sp)m]y(Rp)k. In some embodiments, a pattern of backbone chiral centers of a core comprises or is [(Rp)n(Sp)m]y(Rp)k, [(Rp)n(Sp)m]y, (Sp)t[(Rp)n(Sp)m]y, or (Sp)t[(Rp)n(Sp)m]y(Rp)k. In some embodiments, a pattern of backbone chiral centers of a core comprises [(Rp)n(Sp)m]y(Rp)k. In some embodiments, a pattern of backbone chiral centers of a core comprises [(Rp)n(Sp)m]y(Rp). In some embodiments, a pattern of backbone chiral centers of a core comprises [(Rp)n(Sp)m]y. In some embodiments, a pattern of backbone chiral centers of a core comprises (Sp)t[(Rp)n(Sp)m]y. In some embodiments, a pattern of backbone chiral centers of a core comprises (Sp)t[(Rp)n(Sp)m]y(Rp)k. In some embodiments, a pattern of backbone chiral centers of a core comprises (Sp)t[(Rp)n(Sp)m]y(Rp). In some embodiments, a pattern of backbone chiral centers of a core is [(Rp)n(Sp)m]y(Rp)k. In some embodiments, a pattern of backbone chiral centers of a core is [(Rp)n(Sp)m]y(Rp). In some embodiments, a pattern of backbone chiral centers of a core is [(Rp)n(Sp)m]y. In some embodiments, a pattern of backbone chiral centers of a core is (Sp)t[(Rp)n(Sp)m]y. In some embodiments, a pattern of backbone chiral centers of a core is (Sp)t[(Rp)n(Sp)m]y(Rp)k. In some embodiments, a pattern of backbone chiral centers of a core is (Sp)t[(Rp)n(Sp)m]y(Rp). In some embodiments, each n is 1. In some embodiments, each t is 1. In some embodiments, t is 2, 3, 4, 5, 6, 7, 8, 9, or 10. In some embodiments, each of t and n is 1. In some embodiments, each m is 2 or more. In some embodiments, k is 1. In some embodiments, k is 2-10.

[0609] In some embodiments, a pattern of backbone chiral centers comprises or is (Sp)m(Rp)n, (Rp)n(Sp)m, (Np)t(Rp)n(Sp)m, (Sp)t(Rp)n(Sp)m, (Np)t[(Rp)n(Sp)m]2, (Sp)t[(Rp)n(Sp)m]2, (Np)t(Op)n(Sp)m, (Sp)t(Op)n(Sp)m, (Np)t[(Op)n(Sp)m]2, or (Sp)t[(Op)n(Sp)m]2. In some embodiments, a pattern is (Np)t(Op/Rp)n(Sp)m(Op/Rp)n(Sp)m. In some embodiments, a pattern is (Np)t(Op/Rp)n(Sp)1-5(Op/Rp)n(Sp)m. In some embodiments, a pattern is (Np)t(Op/Rp)n(Sp)2-5(Op/Rp)n(Sp)m. In some embodiments, a pattern is (Np)t(Op/Rp)n(Sp)2(Op/Rp)n(Sp)m. In some embodiments, a pattern is (Np)t(Op/Rp)n(Sp)3(Op/Rp)n(Sp)m. In some embodiments, a pattern is (Np)t(Op/Rp)n(Sp)4(Op/Rp)n(Sp)m. In some embodiments, a pattern is (Np)t(Op/Rp)n(Sp)5(Op/Rp)n(Sp)m.

[0610] In some embodiments, Np is Sp. In some embodiments, (Op/Rp) is Op. In some embodiments, (Op/Rp) is Rp. In some embodiments, Np is Sp and (Op/Rp) is Rp. In some embodiments, Np is Sp and (Op/Rp) is Op. In some embodiments, Np is Sp and at least one (Op/Rp) is Rp, and at least one (Op/Rp) is Op. In some embodiments, a pattern of backbone chiral centers comprises or is (Rp)n(Sp)m, (Np)t(Rp)n(Sp)m, or (Sp)t(Rp)n(Sp)m, wherein m>2. In some embodiments, a pattern of backbone chiral centers comprises or is (Rp)n(Sp)m, (Np)t(Rp)n(Sp)m, or (Sp)t(Rp)n(Sp)m, wherein n is 1, at least one t>1, and at least one m>2. In some embodiments, oligonucleotides comprising core regions whose patterns of backbone chiral centers starting with Rp can provide high activities and/or improved properties. In some embodiments, oligonucleotides comprising core regions whose patterns of backbone chiral centers ending with Rp can provide high activities and/or improved properties. In some embodiments, oligonucleotides comprising core regions whose patterns of backbone chiral centers starting with Rp provide high activities (e.g., target cleavage) without significantly impacting its properties, e.g., stability. In some embodiments, oligonucleotides comprising core regions whose patterns of backbone chiral centers ending with Rp provide high activities (e.g., target cleavage) without significantly impacting its properties, e.g., stability. In some embodiments, patterns of backbone chiral centers start with Rp and end with Sp. In some embodiments, patterns of backbone chiral centers start with Rp and end with Rp. In some embodiments, patterns of backbone chiral centers start with Sp and end with Rp. Typically, for patterns of backbone chiral centers internucleotidic linkages connecting core nucleosides and wing nucleosides are included in the patterns of the core regions. In many embodiments as described in the present disclosure (e.g., various oligonucleotides in Table 1), the wing sugar connected by such a connecting internucleotidic linkage has a different structure than the core sugar connected by the same connecting internucleotidic linkage (e.g., in some embodiments, the wing sugar comprises a 2′-modification while the core sugar does not contain the same 2′-modification or have two —H at the 2′ position). In some embodiments, the wing sugar comprises a sugar modification that the core sugar does not contain. In some embodiments, the wing sugar is a modified sugar while the core sugar is a natural DNA sugar. In some embodiments, the wing sugar comprises a sugar modification at the 2′ position (less than two —H at the 2′ position), and the core sugar has no modification at the 2′-position (two —H at the 2′ position).

[0611] In some embodiments, as demonstrated herein, an additional Rp internucleotidic linkage links a sugar containing no 2′-substituent (e.g., a core sugar) and a sugar comprising a 2′-modification (e.g., 2′-OR′, wherein R′ is optionally substituted C₁₋₆ aliphatic (e.g., 2′-OMe, 2′-MOE, etc.), which can be a wing sugar). In some embodiments, an internucleotidic linkage linking a sugar containing no 2′-substituent to the 5′-end (e.g., to the 3′-carbon of the sugar) and a sugar comprising a 2′-modification to the 3′-end (e.g., to the 5′-carbon of the sugar) is a Rp internucleotidic linkage. In some embodiments, an internucleotidic linkage linking a sugar containing no 2′-substituent to the 3′-end (e.g., to the 5′-carbon of the sugar) and a sugar comprising a 2′-modification to the 5′-end (e.g., to the 3′-carbon of the sugar) is a Rp internucleotidic linkage. In some embodiments, each internucleotidic linkage linking a sugar containing no 2′-substituent and a sugar comprising a 2′-modification is independently a Rp internucleotidic linkage. In some embodiments, a Rp internucleotidic linkage is a Rp phosphorothioate internucleotidic linkage.

[0612] In some embodiments, a pattern of backbone chiral centers of a ds oligonucleotide targeting HSD17B13 or a region thereof (e.g., a core) comprises or is (Op)[(Rp/Op)n(Sp)m]y(Rp)k(Op), (Op)[(Rp/Op)n(Sp)m]y(Op), (Op)(Sp)t[(Rp/Op)n(Sp)m]y(Op), or (Op)(Sp)t[(Rp/Op)n(Sp)m]y(Rp)k(Op), wherein k is 1-50, and each other variable is independently as described in the present disclosure. In some embodiments, a pattern of backbone chiral centers of a ds oligonucleotide targeting HSD17B13 comprises or is (Op)[(Rp/Op)n(Sp)m]y(Rp)k(Op), (Op)[(Rp/Op)n(Sp)m]y(Op), (Op)(Sp)t[(Rp/Op)n(Sp)m]y(Op), or (Op)(Sp)t[(Rp/Op)n(Sp)m]y(Rp)k(Op), wherein each of f, g, h and j is independently 1-50, and each other variable is independently as described in the present disclosure, and the oligonucleotide comprises a core region whose pattern of backbone chiral centers comprises or is [(Rp/Op)n(Sp)m]y(Rp)k, [(Rp/Op)n(Sp)m]y, (Sp)t[(Rp/Op)n(Sp)m]y, or (Sp)t[(Rp/Op)n(Sp)m]y(Rp)k as described in the present disclosure. In some embodiments, a pattern of backbone chiral centers is or comprises (Op)[(Rp/Op)n(Sp)m]y(Rp)k(Op). In some embodiments, a pattern of backbone chiral centers is or comprises (Op)[(Rp/Op)n(Sp)m]y(Rp)(Op). In some embodiments, a pattern of backbone chiral centers is or comprises (Op)[(Rp/Op)n(Sp)m]y(Op). In some embodiments, a pattern of backbone chiral centers is or comprises (Op)(Sp)t[(Rp/Op)n(Sp)m]y(Op). In some embodiments, a pattern of backbone chiral centers is or comprises (Op)(Sp)t[(Rp/Op)n(Sp)m]y(Rp)k(Op). In some embodiments, a pattern of backbone chiral centers is or comprises (Op)(Sp)t[(Rp/Op)n(Sp)m]y(Rp)(Op). In some embodiments, a pattern of backbone chiral centers is or comprises (Op)[(Rp)n(Sp)m]y(Rp)k(Op). In some embodiments, a pattern of backbone chiral centers is or comprises (Op)[(Rp)n(Sp)m]y(Rp)(Op). In some embodiments, a pattern of backbone chiral centers is or comprises (Op)[(Rp)n(Sp)m]y(Op). In some embodiments, a pattern of backbone chiral centers is or comprises (Op)(Sp)t[(Rp)n(Sp)m]y(Op). In some embodiments, a pattern of backbone chiral centers is or comprises (Op)(Sp)t[(Rp)n(Sp)m]y(Rp)k(Op). In some embodiments, a pattern of backbone chiral centers is or comprises (Op)(Sp)t[(Rp)n(Sp)m]y(Rp)(Op). In some embodiments, each n is 1. In some embodiments, k is 1. In some embodiments, k is 2-10.

[0613] In some embodiments, a pattern of backbone chiral centers of a ds oligonucleotide targeting HSD17B13 or a region thereof (e.g., a core) comprises or is (Np)f(Op)g[(Rp/Op)n(Sp)m]y(Rp)k(Op)h(Np)j, (Np)f(Op)g[(Rp/Op)n(Sp)m]y(Op)h(Np)j, (Np)f(Op)g(Sp)t[(Rp/Op)n(Sp)m]y(Op)h(Np)j, or (Np)f(Op)g(Sp)t[(Rp/Op)n(Sp)m]y(Rp)k(Op)h(Np)j, wherein each of f, g, h and j is independently 1-50, and each other variable is independently as described in the present disclosure. In some embodiments, a pattern of backbone chiral centers of a ds oligonucleotide targeting HSD17B13 comprises or is (Np)f(Op)g[(Rp/Op)n(Sp)m]y(Rp)k(Op)h(Np)j, (Np)f(Op)g[(Rp/Op)n(Sp)m]y(Op)h(Np)j, (Np)f(Op)g(Sp)t[(Rp/Op)n(Sp)m]y(Op)h(Np)j, or (Np)f(Op)g(Sp)t[(Rp/Op)n(Sp)m]y(Rp)k(Op)h(Np)j, and the oligonucleotide comprises a core region whose pattern of backbone chiral centers comprises or is [(Rp/Op)n(Sp)m]y(Rp)k, [(Rp/Op)n(Sp)m]y, (Sp)t[(Rp/Op)n(Sp)m]y, or (Sp)t[(Rp/Op)n(Sp)m]y(Rp)k as described in the present disclosure. In some embodiments, a pattern of backbone chiral centers of a ds oligonucleotide targeting HSD17B13 is (Np)f(Op)g[(Rp/Op)n(Sp)m]y(Rp)k(Op)h(Np)j, (Np)f(Op)g[(Rp/Op)n(Sp)m]y(Op)h(Np)j, (Np)f(Op)g(Sp)t[(Rp/Op)n(Sp)m]y(Op)h(Np)j, or (Np)f(Op)g(Sp)t[(Rp/Op)n(Sp)m]y(Rp)k(Op)h(Np)j, and the oligonucleotide comprises a core region whose pattern of backbone chiral centers comprises or is [(Rp/Op)n(Sp)m]y(Rp)k, [(Rp/Op)n(Sp)m]y, (Sp)t[(Rp/Op)n(Sp)m]y, or (Sp)t[(Rp/Op)n(Sp)m]y(Rp)k as described in the present disclosure. In some embodiments, a pattern of backbone chiral centers is or comprises (Np)f(Op)g[(Rp/Op)n(Sp)m]y(Rp)k(Op)h(Np)j. In some embodiments, a pattern of backbone chiral centers is or comprises (Np)f(Op)g[(Rp/Op)n(Sp)m]y(Rp)(Op)h(Np)j. In some embodiments, a pattern of backbone chiral centers is or comprises (Np)f(Op)g[(Rp/Op)n(Sp)m]y(Op)h(Np)j. In some embodiments, a pattern of backbone chiral centers is or comprises (Np)f(Op)g(Sp)t[(Rp/Op)n(Sp)m]y(Op)h(Np)j. In some embodiments, a pattern of backbone chiral centers is or comprises (Np)f(Op)g(Sp)t[(Rp/Op)n(Sp)m]y(Rp)k(Op)h(Np)j. In some embodiments, a pattern of backbone chiral centers is or comprises (Np)f(Op)g(Sp)t[(Rp/Op)n(Sp)m]y(Rp)(Op)h(Np)j. In some embodiments, a pattern of backbone chiral centers is or comprises (Np)f(Op)g[(Rp)n(Sp)m]y(Rp)k(Op)h(Np)j. In some embodiments, a pattern of backbone chiral centers is or comprises (Np)f(Op)g[(Rp)n(Sp)m]y(Rp)(Op)h(Np)j. In some embodiments, a pattern of backbone chiral centers is or comprises (Np)f(Op)g[(Rp)n(Sp)m]y(Op)h(Np)j. In some embodiments, a pattern of backbone chiral centers is or comprises (Np)f(Op)g(Sp)t[(Rp)n(Sp)m]y(Op)h(Np)j. In some embodiments, a pattern of backbone chiral centers is or comprises (Np)f(Op)g(Sp)t[(Rp)n(Sp)m]y(Rp)k(Op)h(Np)j. In some embodiments, a pattern of backbone chiral centers is or comprises (Np)f(Op)g(Sp)t[(Rp)n(Sp)m]y(Rp)(Op)h(Np)j. In some embodiments, at least one Np is Sp. In some embodiments, at least one Np is Rp. In some embodiments, the 5′ most Np is Sp. In some embodiments, the 3′ most Np is Sp. In some embodiments, each Np is Sp. In some embodiments, (Np)f(Op)g[(Rp/Op)n(Sp)m]y(Rp)k(Op)h(Np)j is (Sp)(Op)g[(Rp)n(Sp)m]y(Rp)k(Op)h(Sp). In some embodiments, (Np)f(Op)g[(Rp/Op)n(Sp)m]y(Rp)k(Op)h(Np)j is (Sp)(Op)g[(Rp)n(Sp)m]y(Rp)(Op)h(Sp). In some embodiments, a pattern of backbone chiral center of an oligonucleotide is or comprises (Sp)(Op)g[(Rp)n(Sp)m]y(Rp)(Op)h(Sp). In some embodiments, a pattern of backbone chiral center of an oligonucleotide is (Sp)(Op)g[(Rp)n(Sp)m]y(Rp)(Op)h(Sp). In some embodiments, (Np)f(Op)g[(Rp/Op)n(Sp)m]y(Op)h(Np)j is (Sp)(Op)g[(Rp)n(Sp)m]y(Op)h(Sp). In some embodiments, a pattern of backbone chiral center of an oligonucleotide is or comprises (Sp)(Op)g[(Rp)n(Sp)m]y(Op)h(Sp). In some embodiments, a pattern of backbone chiral center of an oligonucleotide is (Sp)(Op)g[(Rp)n(Sp)m]y(Op)h(Sp). In some embodiments, (Np)f(Op)g(Sp)t[(Rp/Op)n(Sp)m]y(Op)h(Np)j is (Sp)(Op)g(Sp)t[(Rp)n(Sp)m]y(Op)h(Sp). In some embodiments, a pattern of backbone chiral center of an oligonucleotide is or comprises (Sp)(Op)g(Sp)t[(Rp)n(Sp)m]y(Op)h(Sp). In some embodiments, a pattern of backbone chiral center of an oligonucleotide is (Sp)(Op)g(Sp)t[(Rp)n(Sp)m]y(Op)h(Sp). In some embodiments, (Np)f(Op)g(Sp)t[(Rp/Op)n(Sp)m]y(Rp)k(Op)h(Np)j is (Sp)(Op)g(Sp)t[(Rp)n(Sp)m]y(Rp)k(Op)h(Sp). In some embodiments, (Np)f(Op)g(Sp)t[(Rp/Op)n(Sp)m]y(Rp)k(Op)h(Np)j is (Sp)(Op)g(Sp)t[(Rp)n(Sp)m]y(Rp)(Op)h(Sp). In some embodiments, a pattern of backbone chiral center of an oligonucleotide is or comprises (Sp)(Op)g(Sp)t[(Rp)n(Sp)m]y(Rp)(Op)h(Sp). In some embodiments, a pattern of backbone chiral center of an oligonucleotide is (Sp)(Op)g(Sp)t[(Rp)n(Sp)m]y(Rp)(Op)h(Sp). In some embodiments, each n is 1. In some embodiments, f is 1. In some embodiments, g is 1. In some embodiments, g is greater than 1. In some embodiments, g is 2. In some embodiments, g is 3. In some embodiments, g is 4. In some embodiments, g is 5. In some embodiments, g is 6. In some embodiments, g is 7. In some embodiments, g is 8. In some embodiments, g is 9. In some embodiments, g is 10. In some embodiments, h is 1. In some embodiments, h is greater than 1. In some embodiments, h is 2. In some embodiments, h is 3. In some embodiments, h is 4. In some embodiments, h is 5. In some embodiments, h is 6. In some embodiments, h is 7. In some embodiments, h is 8. In some embodiments, h is 9. In some embodiments, h is 10. In some embodiments, j is 1. In some embodiments, k is 1. In some embodiments, k is 2-10. In some embodiments, a pattern of backbone chiral centers of a ds oligonucleotide targeting HSD17B13 or a region thereof (e.g., a core) comprises or is [(Rp/Op)n(Sp)m]y, (Sp)t[(Rp/Op)n(Sp)m]y, (Sp)t[(Rp/Op)n(Sp)m]yRp, [(Rp/Op)n(Sp)m]y(Rp)k, (Sp)t[(Rp/Op)n(Sp)m]y(Rp)k, (Sp)t[(Rp/Op)n(Sp)m]y(Rp)k(Op)h, (Sp)t[(Rp/Op)n(Sp)m]y(Rp)k(Op)h(Np)j, wherein each variable is independently as described in the present disclosure.

[0614] In some embodiments, in a provided pattern of backbone chiral centers, at least one (Rp/Op) is Rp. In some embodiments, at least one (Rp/Op) is Op. In some embodiments, each (Rp/Op) is Rp. In some embodiments, each (Rp/Op) is Op. In some embodiments, at least one of [(Rp)n(Sp)m]y or [(Rp/Op)n(Sp)m]y of a pattern is RpSp. In some embodiments, at least one of [(Rp)n(Sp)m]y or [(Rp/Op)n(Sp)m]y of a pattern is or comprises RpSpSp. In some embodiments, at least one of [(Rp)n(Sp)m]y or [(Rp/Op)n(Sp)m]y in a pattern is RpSp, and at least one of [(Rp)n(Sp)m]y or [(Rp/Op)n(Sp)m]y in a pattern is or comprises RpSpSp. For example, in some embodiments, [(Rp)n(Sp)m]y in a pattern is (RpSp)[(Rp)n(Sp)m]_{(y-1)}; in some embodiments, [(Rp)n(Sp)m]y in a pattern is (RpSp)[RpSpSp(Sp)₍ₘ₋₂₎][(Rp)n(Sp)m]_{(y-2)}. In some embodiments, (Sp)t[(Rp)n(Sp)m]y(Rp) is (Sp)t(RpSp)[(Rp)n(Sp)m]_{(y-1)}(Rp). In some embodiments, (Sp)t[(Rp)n(Sp)m]y(Rp) is (Sp)t(RpSp)[RpSpSp(Sp)₍ₘ₋₂₎][(Rp)n(Sp)m]_{(y-2)}(Rp). In some embodiments, each [(Rp/Op)n(Sp)m] is independently [Rp(Sp)m]. In some embodiments, the first Sp of (Sp)t represents linkage phosphorus stereochemistry of the first internucleotidic linkage of an oligonucleotide from 5′ to 3′. In some embodiments, the first Sp of (Sp)t represents linkage phosphorus stereochemistry of the first internucleotidic linkage of a region from 5′ to 3′, e.g., a core. In some embodiments, the last Np of (Np)j represents linkage phosphorus stereochemistry of the last internucleotidic linkage of the oligonucleotide from 5′ to 3′. In some embodiments, the last Np is Sp.

[0615] In some embodiments, a pattern of backbone chiral centers of an oligonucleotide or a region (e.g., of a 5′-wing) is or comprises Sp(Op)₃. In some embodiments, a pattern of backbone chiral centers of an oligonucleotide or a region (e.g., of a 5′-wing) is or comprises Rp(Op)₃. In some embodiments, a pattern of backbone chiral centers of an oligonucleotide or a region (e.g., of a 3′-wing) is or comprises (Op)₃Sp. In some embodiments, a pattern of backbone chiral centers of an oligonucleotide or a region (e.g., of a 3′-wing) is or comprises (Op)₃Rp. In some embodiments, a pattern of backbone chiral centers of an oligonucleotide or a region (e.g., of a core) is or comprises Rp(Sp)₄Rp(Sp)₄Rp. In some embodiments, a pattern of backbone chiral centers of an oligonucleotide or a region (e.g., of a core) is or comprises (Sp)₅Rp(Sp)₄Rp. In some embodiments, a pattern of backbone chiral centers of an oligonucleotide or a region (e.g., of a core) is or comprises (Sp)₅Rp(Sp)₅. In some embodiments, a pattern of backbone chiral centers of an oligonucleotide or a region (e.g., of a core) is or comprises Rp(Sp)₄Rp(Sp)₅. In some embodiments, a pattern of backbone chiral centers of an oligonucleotide is or comprises Np(Op)₃Rp(Sp)₄Rp(Sp)₄Rp(Op)₃Np. In some embodiments, a pattern of backbone chiral centers of an oligonucleotide is or comprises Np(Op)₃(Sp)₅Rp(Sp)₄Rp(Op)₃Np. In some embodiments, a pattern of backbone chiral centers of an oligonucleotide is or comprises Np(Op)₃(Sp)₅Rp(Sp)₅(Op)₃Np. In some embodiments, a pattern of backbone chiral centers of an oligonucleotide is or comprises Np(Op)₃Rp(Sp)₄Rp(Sp)h(Op)₃Np. In some embodiments, a pattern of backbone chiral centers of an oligonucleotide is or comprises Sp(Op)₃Rp(Sp)₄Rp(Sp)₄Rp(Op)₃Sp. In some embodiments, a pattern of backbone chiral centers of an oligonucleotide is or comprises Sp(Op)₃(Sp)₅Rp(Sp)₄Rp(Op)₃Sp. In some embodiments, a pattern of backbone chiral centers of an oligonucleotide is or comprises Sp(Op)₃(Sp)₅Rp(Sp)₅(Op)₃Sp. In some embodiments, a pattern of backbone chiral centers of an oligonucleotide is or comprises Sp(Op)₃Rp(Sp)₄Rp(Sp)₅(Op)₃Sp. In some embodiments, a pattern of backbone chiral centers of an oligonucleotide is or comprises Rp(Op)₃Rp(Sp)₄Rp(Sp)₄Rp(Op)₃Rp. In some embodiments, a pattern of backbone chiral centers of an oligonucleotide is or comprises Rp(Op)₃(Sp)₅Rp(Sp)₄Rp(Op)₃Rp. In some embodiments, a pattern of backbone chiral centers of an oligonucleotide is or comprises Rp(Op)₃(Sp)₅Rp(Sp)₅(Op)₃Rp. In some embodiments, a pattern of backbone chiral centers of an oligonucleotide is or comprises Rp(Op)₃Rp(Sp)₄Rp(Sp)₅(Op)₃Rp.

[0616] In some embodiments, each of m, y, t, n, k, f, g, h, and j is independently 1-25. In some embodiments, m is 1-25. In some embodiments, m is 1-20. In some embodiments, m is 1-15. In some embodiments, m is 1-10. In some embodiments, m is 1-5. In some embodiments, m is 2-20. In some embodiments, m is 2-15. In some embodiments, m is 2-10. In some embodiments, m is 2-5. In some embodiments, m is 1, 2, 3, 4, 5, 6, 7, 8, 9, 10, 11, 12, 13, 14, 15, 16, 17, 18, 19, 20, 21, 22, 23, 24, or 25. In some embodiments, in a pattern of backbone chiral centers each m is independently 2 or more. In some embodiments, each m is independently 2, 3, 4, 5, 6, 7, 8, 9, or 10. In some embodiments, each m is independently 2-3, 2-5, 2-6, or 2-10. In some embodiments, m is 2. In some embodiments, m is 3. In some embodiments, m is 4. In some embodiments, m is 5. In some embodiments, m is 6. In some embodiments, m is 7. In some embodiments, m is 8. In some embodiments, m is 9. In some embodiments, m is 10. In some embodiments, where there are two or more occurrences of m, they can be the same or different, and each of them is independently as described in the present disclosure.

[0617] In some embodiments, y is 1-25. In some embodiments, y is 1-20. In some embodiments, y is 1-15. In some embodiments, y is 1-10. In some embodiments, y is 1-5. In some embodiments, y is 2-20. In some embodiments, y is 2-15. In some embodiments, y is 2-10. In some embodiments, y is 2-5. In some embodiments, y is 1, 2, 3, 4, 5, 6, 7, 8, 9, 10, 11, 12, 13, 14, 15, 16, 17, 18, 19, 20, 21, 22, 23, 24, or 25. In some embodiments, y is 1, 2, 3, 4, 5, 6, 7, 8, 9, or 10. In some embodiments, y is 1. In some embodiments, y is 2. In some embodiments, y is 3. In some embodiments, y is 4. In some embodiments, y is 5. In some embodiments, y is 6. In some embodiments, y is 7. In some embodiments, y is 8. In some embodiments, y is 9. In some embodiments, y is 10.

[0618] In some embodiments, t is 1-25. In some embodiments, t is 1-20. In some embodiments, t is 1-15. In some embodiments, t is 1-10. In some embodiments, t is 1-5. In some embodiments, t is 2-20. In some embodiments, t is 2-15. In some embodiments, t is 2-10. In some embodiments, t is 2-5. In some embodiments, t is 1, 2, 3, 4, 5, 6, 7, 8, 9, 10, 11, 12, 13, 14, 15, 16, 17, 18, 19, 20, 21, 22, 23, 24, or 25. In some embodiments, each t is independently 1, 2, 3, 4, 5, 6, 7, 8, 9, or 10. In some embodiments, t is 2 or more. In some embodiments, t is 1. In some embodiments, t is 2. In some embodiments, t is 3. In some embodiments, t is 4. In some embodiments, t is 5. In some embodiments, t is 6. In some embodiments, t is 7. In some embodiments, t is 8. In some embodiments, t is 9. In some embodiments, t is 10. In some embodiments, where there are two or more occurrences of t, they can be the same or different, and each of them is independently as described in the present disclosure.

[0619] In some embodiments, n is 1-25. In some embodiments, n is 1, 2, 3, 4, 5, 6, 7, 8, 9, 10, 11, 12, 13, 14, 15, 16, 17, 18, 19, 20, 21, 22, 23, 24, or 25. In some embodiments, n is 1. In some embodiments, n is 2. In some embodiments, n is 3. In some embodiments, n is 4. In some embodiments, n is 5. In some embodiments, n is 6. In some embodiments, n is 7. In some embodiments, n is 8. In some embodiments, n is 9. In some embodiments, n is 10. In some embodiments, where there are two or more occurrences of n, they can be the same or different, and each of them is independently as described in the present disclosure. In many embodiments, in a pattern of backbone chiral centers, at least one occurrence of n is 1; in some cases, each n is 1.

[0620] In some embodiments, k is 1-25. In some embodiments, k is 1, 2, 3, 4, 5, 6, 7, 8, 9, 10, 11, 12, 13, 14, 15, 16, 17, 18, 19, 20, 21, 22, 23, 24, or 25. In some embodiments, k is 1. In some embodiments, k is 2. In some embodiments, k is 3. In some embodiments, k is 4. In some embodiments, k is 5. In some embodiments, k is 6. In some embodiments, k is 7. In some embodiments, k is 8. In some embodiments, k is 9. In some embodiments, k is 10. In some embodiments, f is 1-25. In some embodiments, f is 1-20. In some embodiments, f is 1-10. In some embodiments, f is 1-5. In some embodiments, f is 1, 2, 3, 4, 5, 6, 7, 8, 9, 10, 11, 12, 13, 14, 15, 16, 17, 18, 19, 20, 21, 22, 23, 24, or 25. In some embodiments, f is 1. In some embodiments, f is 2. In some embodiments, f is 3. In some embodiments, f is 4. In some embodiments, f is 5. In some embodiments, f is 6. In some embodiments, f is 7. In some embodiments, f is 8. In some embodiments, f is 9. In some embodiments, f is 10.

[0621] In some embodiments, g is 1-25. In some embodiments, g is 1-20. In some embodiments, g is 1-10. In some embodiments, g is 1-5. In some embodiments, g is 2-10. In some embodiments, g is 2-5. In some embodiments, g is 1, 2, 3, 4, 5, 6, 7, 8, 9, 10, 11, 12, 13, 14, 15, 16, 17, 18, 19, 20, 21, 22, 23, 24, or 25. In some embodiments, g is 1. In some embodiments, g is 2. In some embodiments, g is 3. In some embodiments, g is 4. In some embodiments, g is 5. In some embodiments, g is 6. In some embodiments, g is 7. In some embodiments, g is 8. In some embodiments, g is 9. In some embodiments, g is 10. In some embodiments, h is 1-25. In some embodiments, h is 1-10. In some 2% embodiments, h is 1-5. In some embodiments, h is 2-10. In some embodiments, h is 2-5. In some embodiments, h is 1, 2, 3, 4, 5, 6, 7, 8, 9, 10, 11, 12, 13, 14, 15, 16, 17, 18, 19, 20, 21, 22, 23, 24, or 25. In some embodiments, h is 1. In some embodiments, h is 2. In some embodiments, h is 3. In some embodiments, h is 4. In some embodiments, h is 5. In some embodiments, h is 6. In some embodiments, h is 7. In some embodiments, h is 8. In some embodiments, h is 9. In some embodiments, h is 10.

[0622] In some embodiments, j is 1-25. In some embodiments, j is 1-10. In some embodiments, j is 1-5. In some embodiments, j is 1, 2, 3, 4, 5, 6, 7, 8, 9, 10, 11, 12, 13, 14, 15, 16, 17, 18, 19, 20, 21, 22, 23, 24, or 25. In some embodiments, j is 1. In some embodiments, j is 2. In some embodiments, j is 3. In some embodiments, j is 4. In some embodiments, j is 5. In some embodiments, j is 6. In some embodiments, j is 7. In some embodiments, j is 8. In some embodiments, j is 9. In some embodiments, j is 10.

[0623] In some embodiments, at least one n is 1, and at least one m is no less than 2. In some embodiments, at least one n is 1, at least one t is no less than 2, and at least one m is no less than 3. In some embodiments, each n is 1. In some embodiments, t is 1. In some embodiments, at least one t>1. In some embodiments, at least one t>2. In some embodiments, at least one t>3. In some embodiments, at least one t>4. In some embodiments, at least one m>1. In some embodiments, at least one m>2. In some embodiments, at least one m>3. In some embodiments, at least one m>4. In some embodiments, a pattern of backbone chiral centers comprises one or more achiral natural phosphate linkages. In some embodiments, the sum of m, t, and n (or m and n if no t in a pattern) is no less than 5, 6, 7, 8, 9, 10, 11, 12, 13, 14, 15, 16, 17, 18, 19 or 20. In some embodiments, the sum is 5. In some embodiments, the sum is 6. In some embodiments, the sum is 7. In some embodiments, the sum is 8. In some embodiments, the sum is 9. In some embodiments, the sum is 10. In some embodiments, the sum is 11. In some embodiments, the sum is 12. In some embodiments, the sum is 13. In some embodiments, the sum is 14. In some embodiments, the sum is 15.

[0624] In some embodiments, a number of linkage phosphorus in chirally controlled internucleotidic linkages are Sp. In some embodiments, at least 10%, 20%, 25%, 30%, 35%, 40%, 45%, 50%, 55%, 60%, 65%, 70%, 75%, 80%, 85%, 90% or 95% of chirally controlled internucleotidic linkages have Sp linkage phosphorus. In some embodiments, at least 10%, 20%, 25%, 30%, 35%, 40%, 45%, 50%, 55%, 60%, 65%, 70%, 75%, 80%, 85%, 90% or 95% of all chiral internucleotidic linkages are chirally controlled internucleotidic linkages having Sp linkage phosphorus. In some embodiments, at least 10%, 20%, 25%, 30%, 35%, 40%, 45%, 50%, 55%, 60%, 65%, 70%, 75%, 80%, 85%, 90% or 95% of all internucleotidic linkages are chirally controlled internucleotidic linkages having Sp linkage phosphorus. In some embodiments, the percentage is at least 20%. In some embodiments, the percentage is at least 30%. In some embodiments, the percentage is at least 40%. In some embodiments, the percentage is at least 50%. In some embodiments, the percentage is at least 60%. In some embodiments, the percentage is at least 65%. In some embodiments, the percentage is at least 70%. In some embodiments, the percentage is at least 75%. In some embodiments, the percentage is at least 80%. In some embodiments, the percentage is at least 90%. In some embodiments, the percentage is at least 95%. In some embodiments, at least 1, 2, 3, 4, 5, 6, 7, 8, 9, 10, 11, 12, 13, 14, 15, 16, 17, 18, 19, 20, 21, 22, 23, 24, or 25 internucleotidic linkages are chirally controlled internucleotidic linkages having Sp linkage phosphorus. In some embodiments, at least 5 internucleotidic linkages are chirally controlled internucleotidic linkages having Sp linkage phosphorus. In some embodiments, at least 6 internucleotidic linkages are chirally controlled internucleotidic linkages having Sp linkage phosphorus. In some embodiments, at least 7 internucleotidic linkages are chirally controlled internucleotidic linkages having Sp linkage phosphorus. In some embodiments, at least 8 internucleotidic linkages are chirally controlled internucleotidic linkages having Sp linkage phosphorus. In some embodiments, at least 9 internucleotidic linkages are chirally controlled internucleotidic linkages having Sp linkage phosphorus. In some embodiments, at least 10 internucleotidic linkages are chirally controlled internucleotidic linkages having Sp linkage phosphorus. In some embodiments, at least 11 internucleotidic linkages are chirally controlled internucleotidic linkages having Sp linkage phosphorus. In some embodiments, at least 12 internucleotidic linkages are chirally controlled internucleotidic linkages having Sp linkage phosphorus. In some embodiments, at least 13 internucleotidic linkages are chirally controlled internucleotidic linkages having Sp linkage phosphorus. In some embodiments, at least 14 internucleotidic linkages are chirally controlled internucleotidic linkages having Sp linkage phosphorus. In some embodiments, at least 15 internucleotidic linkages are chirally controlled internucleotidic linkages having Sp linkage phosphorus. In some embodiments, at least 1, 2, 3, 4, 5, 6, 7, 8, 9, 10, 11, 12, 13, 14, 15, 16, 17, 18, 19, 20, 21, 22, 23, 24, or 25 internucleotidic linkages are chirally controlled internucleotidic linkages having Rp linkage phosphorus. In some embodiments, no more than 1, 2, 3, 4, 5, 6, 7, 8, 9, 10, 11, 12, 13, 14, 15, 16, 17, 18, 19, 20, 21, 22, 23, 24, or 25 internucleotidic linkages are chirally controlled internucleotidic linkages having Rp linkage phosphorus. In some embodiments, one and no more than one internucleotidic linkage in an oligonucleotide is a chirally controlled internucleotidic linkage having Rp linkage phosphorus. In some embodiments, 2 and no more than 2 internucleotidic linkages in an oligonucleotide are chirally controlled internucleotidic linkages having Rp linkage phosphorus. In some embodiments, 3 and no more than 3 internucleotidic linkages in an oligonucleotide are chirally controlled internucleotidic linkages having Rp linkage phosphorus. In some embodiments, 4 and no more than 4 internucleotidic linkages in an oligonucleotide are chirally controlled internucleotidic linkages having Rp linkage phosphorus. In some embodiments, 5 and no more than 5 internucleotidic linkages in an oligonucleotide are chirally controlled internucleotidic linkages having Rp linkage phosphorus.

[0625] In some embodiments, all, essentially all or most of the internucleotidic linkages in an oligonucleotide are in the Sp configuration (e.g., about 50%-100%, 55%-100%, 60%-100%, 65%-100%, 70%-100%, 75%-100%, 80%-100%, 85%-100%, 90%-100%, 55%-95%, 60%-95%, 65%-95%, or about 55%, 60%, 65%, 70%, 75%, 80%, 85%, 90%, 95%, 97%, 99% or more of all chirally controlled internucleotidic linkages, or of all chiral internucleotidic linkages, or of all internucleotidic linkages in the oligonucleotide) except for one or a minority of internucleotidic linkages (e.g., 1, 2, 3, 4, or 5, and/or less than 50%, 45%, 40%, 35%, 30%, 25%, 20%, 15%, 10%, or 5% of all chirally controlled internucleotidic linkages, or of all chiral internucleotidic linkages, or of all internucleotidic linkages in the oligonucleotide) being in the Rp configuration. In some embodiments, all, essentially all or most of the internucleotidic linkages in a core are in the Sp configuration (e.g., about 50%-100%, 55%/o-100%, 60%-100%, 65%-100%, 70%-100%, 75%-100%, 80%-100%, 85%-100%, 90%-100%, 55%-95%, 60%-95%, 65%-95%, or about 55%, 60%, 65%, 70%, 75%, 80%, 85%, 90%, 95%, 97%, 99% or more of all chirally controlled internucleotidic linkages, or of all chiral internucleotidic linkages, or of all internucleotidic linkages, in the core) except for one or a minority of internucleotidic linkages (e.g., 1, 2, 3, 4, or 5, and/or less than 50%, 45%, 40%, 35%, 30%, 25%, 20%, 15%, 10%, or 5% of all chirally controlled internucleotidic linkages, or of all chiral internucleotidic linkages, or of all internucleotidic linkages, in the core) being in the Rp configuration. In some embodiments, all, essentially all or most of the internucleotidic linkages in the core are a phosphorothioate in the Sp configuration (e.g., about 50%-100%, 55%-100%, 60%-100%, 65%-100%, 70%-100%, 75%-100%, 80%-100%, 85%-100%, 90%-100%, 55%-95%, 60%-95%, 65%-95%, or about 55%, 60%, 65%, 70%, 75%, 80%, 85%, 90%, 95%, 97%, 99% or more of all chirally controlled internucleotidic linkages, or of all chiral internucleotidic linkages, or of all internucleotidic linkages, in the core) except for one or a minority of internucleotidic linkages (e.g., 1, 2, 3, 4, or 5, and/or less than 50%, 45%, 40%, 35%, 30%, 25%, 20%, 15%, 10%, or 5% of all chirally controlled internucleotidic linkages, or of all chiral internucleotidic linkages, or of all internucleotidic linkages, in the core) being a phosphorothioate in the Rp configuration. In some embodiments, each internucleotidic linkage in the core is a phosphorothioate in the Sp configuration except for one phosphorothioate in the Rp configuration. In some embodiments, each internucleotidic linkage in the core is a phosphorothioate in the Sp configuration except for one phosphorothioate in the Rp configuration.

[0626] In some embodiments, an oligonucleotide comprises one or more Rp internucleotidic linkages. In some embodiments, an oligonucleotide comprises one and no more than one Rp internucleotidic linkages. In some embodiments, an oligonucleotide comprises two or more Rp internucleotidic linkages. In some embodiments, an oligonucleotide comprises three or more Rp internucleotidic linkages. In some embodiments, an oligonucleotide comprises four or more Rp internucleotidic linkages. In some embodiments, an oligonucleotide comprises five or more Rp internucleotidic linkages. In some embodiments, about 5%-50% of all chirally controlled internucleotidic linkages in an oligonucleotide are Rp. In some embodiments, about 5%-40% of all chirally controlled internucleotidic linkages in an oligonucleotide are Rp. In some embodiments, about 10%-40% of all chirally controlled internucleotidic linkages in an oligonucleotide are Rp. In some embodiments, about 15%-40% of all chirally controlled internucleotidic linkages in an oligonucleotide are Rp. In some embodiments, about 20%-40% of all chirally controlled internucleotidic linkages in an oligonucleotide are Rp. In some embodiments, about 25%-40% of all chirally controlled internucleotidic linkages in an oligonucleotide are Rp. In some embodiments, about 30%-40% of all chirally controlled internucleotidic linkages in an oligonucleotide are Rp. In some embodiments, about 35%-40% of all chirally controlled internucleotidic linkages in an oligonucleotide are Rp.

[0627] In some embodiments, instead of an Rp internucleotidic linkage, a natural phosphate linkage may be similarly utilized, optionally with a modification, e.g., a sugar modification (e.g., a 5′-modification such as R^{5s} as described herein). In some embodiments, a modification improves stability of a natural phosphate linkage.

[0628] In some embodiments, the present disclosure provides an oligonucleotide having a pattern of backbone chiral centers as described herein. In some embodiments, oligonucleotides in a chirally controlled oligonucleotide composition share a common pattern of backbone chiral centers as described herein.

[0629] In some embodiments, at least about 25% of the internucleotidic linkages of a ds oligonucleotide targeting HSD17B13 are chirally controlled and have Sp linkage phosphorus. In some embodiments, at least about 30% of the internucleotidic linkages of an oligonucleotide are chirally controlled and have Sp linkage phosphorus. In some embodiments, at least about 40% of the internucleotidic linkages of a provided oligonucleotide are chirally controlled and have Sp linkage phosphorus. In some embodiments, at least about 50% of the internucleotidic linkages of a provided oligonucleotide are chirally controlled and have Sp linkage phosphorus. In some embodiments, at least about 60% of the internucleotidic linkages of a provided oligonucleotide are chirally controlled and have Sp linkage phosphorus. In some embodiments, at least about 65% of the internucleotidic linkages of a provided oligonucleotide are chirally controlled and have Sp linkage phosphorus. In some embodiments, at least about 70% of the internucleotidic linkages of a provided oligonucleotide are chirally controlled and have Sp linkage phosphorus. In some embodiments, at least about 75% of the internucleotidic linkages of a provided oligonucleotide are chirally controlled and have Sp linkage phosphorus. In some embodiments, at least about 80% of the internucleotidic linkages of a provided oligonucleotide are chirally controlled and have Sp linkage phosphorus. In some embodiments, at least about 85% of the internucleotidic linkages of a provided oligonucleotide are chirally controlled and have Sp linkage phosphorus. In some embodiments, at least about 90% of the internucleotidic linkages of a provided oligonucleotide are chirally controlled and have Sp linkage phosphorus. In some embodiments, at least about 95% of the internucleotidic linkages of a provided oligonucleotide are chirally controlled and have Sp linkage phosphorus.

[0630] In some embodiments, the present disclosure provides chirally controlled oligonucleotide compositions, e.g., chirally controlled ds oligonucleotide targeting HSD17B13 compositions, wherein the composition comprises a non-random or controlled level of a plurality of oligonucleotides, wherein oligonucleotides of the plurality share a common base sequence, and share the same configuration of linkage phosphorus independently at 1-50, 1-40, 1-30, 1-25, 1-20, 1-15, 1-10, 5-50, 5-40, 5-30, 5-25, 5-20, 5-15, 5-10, 1, 2, 3, 4, 5, 6, 7, 8, 9, 10, 11, 12, 13, 14, 15, 16, 17, 18, 19, 20, 21, 22, 23, 24, or 25 or more chiral internucleotidic linkages.

[0631] In some embodiments, ds oligonucleotides targeting HSD17B13 comprise 2-30 chirally controlled internucleotidic linkages. In some embodiments, provided oligonucleotide compositions comprise 5-30 chirally controlled internucleotidic linkages. In some embodiments, provided oligonucleotide compositions comprise 10-30 chirally controlled internucleotidic linkages.

[0632] In some embodiments, a percentage is about 5%-100%. In some embodiments, a percentage is at least 50%, 55%, 60%, 65%, 70%, 75%, 80%, 85%, 90%, 95%, 965, 96%, 98%, or 99%. In some embodiments, a percentage is about 5%, 10%, 15%, 20%, 25%, 30%, 35%, 40%, 45%, 50%, 55%, 60%, 65%, 70%, 75%, 80%, 85%, 90%, 95%, 965, 96%, 98%, or 99%. In some embodiments, a pattern of backbone chiral centers in a ds oligonucleotide targeting HSD17B13 comprises a pattern of i^{o}-i^{s}-i^{o}-i^{s}-i⁰, i^{o}-i^{s}-i^{s}-i^{s}-i^{o}, i^{o}-i^{s}-i^{s}-i^{s}-i^{o}-i^{s}, i^{s}- i^{o}-i^{s}-i^{o}, i^{s}-i^{o}-i^{s}-i^{o}, i^{s}-i^{o}-i^{s}-i^{o}-i^{s}, i^{s}-i^{o}-i^{s}-i^{o}-i^{s}-i^{o}, i^{s}-i^{o}-i^{s}-i^{o}-i^{s}-i^{o}-i^{s}-i^{o}, i^{s}-i^{o}-i^{s}-i^{s}-i^{s}-i^{o}, i^{s}-i^{s}-i^{o}-i^{s}-i^{s}-i^{s}-i^{o}-i^{s}-i^{s}, i^{s}-i^{s}-i^{s}-i^{o}-i^{s}-i^{o}-i^{s}-i^{s}-i^{s}, i^{s}-i^{s}-i^{s}-i^{s}-i^{o}-i^{s}-i^{o}-i^{s}-i^{s}-i^{s}-i^{s}, i^{s}-i^{s}-i^{s}-i^{s}-i^{s}, i^{s}-i^{s}-i^{s}-i^{s}-i^{s}-i^{s}, i^{s}-i^{s}-i^{s}-i^{s}-i^{s}-i^{s}-i^{s}, i^{s}-i^{s}-i^{s}-i^{s}-i^{s}-i^{s}-i^{s}-i^{s}-i^{s}, i^{s}-i^{s}-i^{s}-i^{s}-i^{s}-i^{s}-i^{s}-i^{s}, or i^{r}-i^{r}-i^{r}, wherein i^{s} represents an internucleotidic linkage in the Sp configuration; i^{o} represents an achiral internucleotidic linkage; and i^{r} represents an internucleotidic linkage in the Rp configuration.

[0633] In some embodiments, an internucleotidic linkage in the Sp configuration (having a Sp linkage phosphorus) is a phosphorothioate internucleotidic linkage. In some embodiments, an achiral internucleotidic linkage is a natural phosphate linkage. In some embodiments, an internucleotidic linkage in the Rp configuration (having a Rp linkage phosphorus) is a phosphorothioate internucleotidic linkage. In some embodiments, each internucleotidic linkage in the Sp configuration is a phosphorothioate internucleotidic linkage. In some embodiments, each achiral internucleotidic linkage is a natural phosphate linkage. In some embodiments, each internucleotidic linkage in the Rp configuration is a phosphorothioate internucleotidic linkage. In some embodiments, each internucleotidic linkage in the Sp configuration is a phosphorothioate internucleotidic linkage, each achiral internucleotidic linkage is a natural phosphate linkage, and each internucleotidic linkage in the Rp configuration is a phosphorothioate internucleotidic linkage.

[0634] In some embodiments, a pattern of backbone chiral centers (e.g., a pattern of backbone chiral centers in an oligonucleotide, e.g., a ds oligonucleotide targeting HSD17B13 or in a core or a wing or in two wings of an oligonucleotide, e.g., a ds oligonucleotide targeting HSD17B13) comprises a pattern of OpSpOpSpOp, OpSpSpSpOp, OpSpSpSpOpSp, SpOpSpOp, SpOpSpOp, SpOpSpOpSp, SpOpSpOpSpOp, SpOpSpOpSpOpSpOp, SpOpSpSPSpOp, SpSpOpSpSpSpOpSpSp, SpSpSpOpSpOpSpSpSp, SpSpSpSpOpSpOpSpS SpSpSpSp, SpSpSpSpSpSp, SpSpSpSppSp, SpSpSpSpSpSpSpSp, SpSpSpSpSpSpSpSpSp, or RpRpRp, wherein each Rp and Sp is independently the linkage phosphorus configuration of a chirally controlled internucleotidic linkage (in some embodiments, each Rp and Sp is independently the linkage phosphorus configuration of a chirally controlled phosphorothioate internucleotidic linkage), and each Op independently represents linkage phosphorus being achiral in a natural phosphate linkage.

[0635] In some embodiments, a pattern of backbone chiral centers (e.g., of an oligonucleotide, e.g., a ds oligonucleotide targeting HSD17B13, or a portion thereof) is or comprises a pattern of backbone chiral centers described in Table 1.

[0636] In some embodiments, an internucleotidic linkage bonded to a wing nucleoside and a core nucleoside is considered one of the core internucleotidic linkages, for example, when describing types, modifications, numbers, and/or patterns of core internucleotidic linkages. In some embodiments, each internucleotidic linkage bonded to a wing nucleoside and a core nucleoside is considered one of the core internucleotidic linkages, for example, when describing types, modifications, numbers, and/or patterns of core internucleotidic linkages. In some embodiments, a core internucleotidic linkage is bonded to two core nucleosides. In some embodiments, a core internucleotidic linkage is bonded to a core nucleoside and a wing nucleoside. In some embodiments, each core internucleotidic linkage is independently bonded to two core nucleosides, or a core nucleoside and a wing nucleoside. In some embodiments, each wing internucleotidic linkage is independently bonded to two wing nucleosides.

[0637] In some embodiments, ds oligonucleotides targeting HSD17B13 in chirally controlled oligonucleotide compositions each comprise different types of internucleotidic linkages. In some embodiments, ds oligonucleotides targeting HSD17B13 comprise at least one natural phosphate linkage and at least one modified internucleotidic linkage. In some embodiments, ds oligonucleotides targeting HSD17B13 comprise at least one natural phosphate linkage and at least two modified internucleotidic linkages. In some embodiments, ds oligonucleotides targeting HSD17B13 comprise at least one natural phosphate linkage and at least three modified internucleotidic linkages. In some embodiments, ds oligonucleotides targeting HSD17B13 comprise at least one natural phosphate linkage and at least four modified internucleotidic linkages. In some embodiments, ds oligonucleotides targeting HSD17B13 comprise at least one natural phosphate linkage and at least five modified internucleotidic linkages. In some embodiments, ds oligonucleotides targeting HSD17B13 comprise at least one natural phosphate linkage and 1, 2, 3, 4, 5, 6, 7, 8, 9, 10, 11, 12, 13, 14, 15, 16, 17, 18, 19, 20, 21, 22, 23, 24, or 25 modified internucleotidic linkages. In some embodiments, a modified internucleotidic linkage is a phosphorothioate internucleotidic linkage. In some embodiments, each modified internucleotidic linkage is a phosphorothioate internucleotidic linkage. In some embodiments, a modified internucleotidic linkage is a phosphorothioate triester internucleotidic linkage. In some embodiments, each modified internucleotidic linkage is a phosphorothioate triester internucleotidic linkage. In some embodiments, ds oligonucleotides targeting HSD17B13 comprise at least one natural phosphate linkage and at least 2, 3, 4, 5, 6, 7, 8, 9, 10, 11, 12, 13, 14, 15, 16, 17, 18, 19, 20, 21, 22, 23, 24, or 25 consecutive modified internucleotidic linkages. In some embodiments, ds oligonucleotides targeting HSD17B13 comprise at least one natural phosphate linkage and at least 2, 3, 4, 5, 6, 7, 8, 9, 10, 11, 12, 13, 14, 15, 16, 17, 18, 19, 20, 21, 22, 23, 24, or 25 consecutive phosphorothioate internucleotidic linkages. In some embodiments, ds oligonucleotides targeting HSD17B13 comprise at least one natural phosphate linkage and at least 2, 3, 4, 5, 6, 7, 8, 9, 10, 11, 12, 13, 14, 15, 16, 17, 18, 19, 20, 21, 22, 23, 24, or 25 consecutive phosphorothioate triester internucleotidic linkages.

[0638] In some embodiments, oligonucleotides in a chirally controlled oligonucleotide composition each comprise at least two internucleotidic linkages that have different stereochemistry and/or different P-modifications relative to one another. In some embodiments, at least two internucleotidic linkages have different stereochemistry relative to one another, and the oligonucleotides each comprise a pattern of backbone chiral centers comprising alternating linkage phosphorus stereochemistry.

[0639] In some embodiments, a linkage comprises a chiral auxiliary, which, for example, is used to control the stereoselectivity of a reaction, e.g., a coupling reaction in an oligonucleotide synthesis cycle. In some embodiments, a phosphorothioate triester linkage does not comprise a chiral auxiliary. In some embodiments, a phosphorothioate triester linkage is intentionally maintained until and/or during the administration of the oligonucleotide composition to a subject.

[0640] In some embodiments, purity, particularly stereochemical purity, and particularly diastereomeric purity of many oligonucleotides and compositions thereof wherein all other chiral centers in the oligonucleotides but the chiral linkage phosphorus centers have been stereodefined (e.g., carbon chiral centers in the sugars, which are defined in, e.g., phosphoramidites for oligonucleotide synthesis), can be controlled by stereoselectivity (as appreciated by those skilled in this art, diastereoselectivity in many cases of oligonucleotide synthesis wherein the oligonucleotide comprise more than one chiral centers) at chiral linkage phosphorus in coupling steps when forming chiral internucleotidic linkages. In some embodiments, a coupling step has a stereoselectivity (diastereoselectivity when there are other chiral centers) of 60% at the linkage phosphorus. After such a coupling step, the new internucleotidic linkage formed may be referred to have a 60% stereochemical purity (for oligonucleotides, typically diastereomeric purity in view of the existence of other chiral centers). In some embodiments, each coupling step independently has a stereoselectivity of at least 60%. In some embodiments, each coupling step independently has a stereoselectivity of at least 70%. In some embodiments, each coupling step independently has a stereoselectivity of at least 80%. In some embodiments, each coupling step independently has a stereoselectivity of at least 85%. In some embodiments, each coupling step independently has a stereoselectivity of at least 90%. In some embodiments, each coupling step independently has a stereoselectivity of at least 91%. In some embodiments, each coupling step independently has a stereoselectivity of at least 92%. In some embodiments, each coupling step independently has a stereoselectivity of at least 93%. In some embodiments, each coupling step independently has a stereoselectivity of at least 94%. In some embodiments, each coupling step independently has a stereoselectivity of at least 95%. In some embodiments, each coupling step independently has a stereoselectivity of at least 96%. In some embodiments, each coupling step independently has a stereoselectivity of at least 97%. In some embodiments, each coupling step independently has a stereoselectivity of at least 98%. In some embodiments, each coupling step independently has a stereoselectivity of at least 99%. In some embodiments, each coupling step independently has a stereoselectivity of at least 99.5%. In some embodiments, each coupling step independently has a stereoselectivity of virtually 100%. In some embodiments, a coupling step has a stereoselectivity of virtually 100% in that each detectable product from the coupling step analyzed by an analytical method (e.g., NMR, HPLC, etc.) has the intended stereoselectivity. In some embodiments, a chirally controlled internucleotidic linkage is typically formed with a stereoselectivity of at least 90%, 91%, 92%, 93%, 94%, 95%, 96%, 97%, 98%, 99.5% or virtually 100% (in some embodiments, at least 90%; in some embodiments, at least 95%; in some embodiments, at least 96%; in some embodiments, at least 97%; in some embodiments, at least 98%; in some embodiments, at least 99%). In some embodiments, a chirally controlled internucleotidic linkage has a stereochemical purity (typically diastereomeric purity for oligonucleotides with multiple chiral centers) of at least 90%, 91%, 92%, 93%, 94%, 95%, 96%, 97%, 98%, 99.5% or virtually 100% (in some embodiments, at least 90%; in some embodiments, at least 95%; in some embodiments, at least 96%; in some embodiments, at least 97%; in some embodiments, at least 98%; in some embodiments, at least 99%) at its chiral linkage phosphorus. In some embodiments, each chirally controlled internucleotidic linkage independently has a stereochemical purity (typically diastereomeric purity for oligonucleotides with multiple chiral centers) of at least 90%, 91%, 92%, 93%, 94%, 95%, 96%, 97%, 98%, 99.5% or virtually 100% (in some embodiments, at least 90%; in some embodiments, at least 95%; in some embodiments, at least 96%; in some embodiments, at least 97%; in some embodiments, at least 98%; in some embodiments, at least 99%) at its chiral linkage phosphorus. In some embodiments, a non-chirally controlled internucleotidic linkage is typically formed with a stereoselectivity of less than 60%, 70%, 80%, 85%, or 90% (in some embodiments, less than 60%; in some embodiments, less than 70%; in some embodiments, less than 80%; in some embodiments, less than 85%; in some embodiments, less than 90%). In some embodiments, each non-chirally controlled internucleotidic linkage is independently formed with a stereoselectivity of less than 60%, 70%, 80%, 85%, or 90% (in some embodiments, less than 60%; in some embodiments, less than 70%; in some embodiments, less than 80%; in some embodiments, less than 85%; in some embodiments, less than 90%). In some embodiments, a non-chirally controlled internucleotidic linkage has a stereochemical purity (typically diastereomeric purity for oligonucleotides with multiple chiral centers) of less than 60%, 70%, 80%, 85%, or 90% (in some embodiments, less than 60%; in some embodiments, less than 70%; in some embodiments, less than 80%; in some embodiments, less than 85%; in some embodiments, less than 90%) at its chiral linkage phosphorus. In some embodiments, each non-chirally controlled internucleotidic linkage independently has a stereochemical purity (typically diastereomeric purity for oligonucleotides with multiple chiral centers) of less than 60%, 70%, 80%, 85%, or 90% (in some embodiments, less than 60%; in some embodiments, less than 70%; in some embodiments, less than 80%; in some embodiments, less than 85%; in some embodiments, less than 90%) at its chiral linkage phosphorus.

[0641] In some embodiments, at least 1, 2, 3, 4, 5, 6, 7, 8, 9, or 10 couplings of a monomer (as appreciated by those skilled in the art in many embodiments a phosphoramidite for oligonucleotide synthesis) independently have a stereoselectivity less than about 60%, 70%, 80%, 85%, or 90% [for oligonucleotide synthesis, typically diastereoselectivity with respect to formed linkage phosphorus chiral center(s)]. In some embodiments, at least one coupling has a stereoselectivity less than about 60%, 70%, 80%, 85%, or 90%. In some embodiments, at least two couplings independently have a stereoselectivity less than about 60%, 70%, 80%, 85%, or 90%. In some embodiments, at least three couplings independently have a stereoselectivity less than about 60%, 70%, 80%, 85%, or 90%. In some embodiments, at least four couplings independently have a stereoselectivity less than about 60%, 70%, 80%, 85%, or 90%. In some embodiments, at least five couplings independently have a stereoselectivity less than about 60%, 70%, 80%, 85%, or 90%. In some embodiments, each coupling independently has a stereoselectivity less than about 60%, 70%, 80%, 85%, or 90%. In some embodiments, each non-chirally controlled internucleotidic linkage is independently formed with a stereoselectivity less than about 60%, 70%, 80%, 85%, or 90%. In some embodiments, a stereoselectivity is less than about 60%. In some embodiments, a stereoselectivity is less than about 70%. In some embodiments, a stereoselectivity is less than about 80%. In some embodiments, a stereoselectivity is less than about 90%. In some embodiments, at least 1, 2, 3, 4, 5, 6, 7, 8, 9, 10, 11, 12, 13, 14, 15, 16, 17, 18, 19, 20, 21, 22, 23, 24, or 25 couplings independently have a stereoselectivity less than about 90%. In some embodiments, at least one coupling has a stereoselectivity less than about 90%. In some embodiments, at least two couplings have a stereoselectivity less than about 90%. In some embodiments, at least three couplings have a stereoselectivity less than about 90%. In some embodiments, at least four couplings have a stereoselectivity less than about 90%. In some embodiments, at least five couplings have a stereoselectivity less than about 90%. In some embodiments, each coupling independently has a stereoselectivity less than about 90%. In some embodiments, at least 1, 2, 3, 4, 5, 6, 7, 8, 9, 10, 11, 12, 13, 14, 15, 16, 17, 18, 19, 20, 21, 22, 23, 24, or 25 couplings independently have a stereoselectivity less than about 85%. In some embodiments, each coupling independently has a stereoselectivity less than about 85%. In some embodiments, at least 1, 2, 3, 4, 5, 6, 7, 8, 9, 10, 11, 12, 13, 14, 15, 16, 17, 18, 19, 20, 21, 22, 23, 24, or 25 couplings independently have a stereoselectivity less than about 80%. In some embodiments, each coupling independently has a stereoselectivity less than about 80%. In some embodiments, at least 1, 2, 3, 4, 5, 6, 7, 8, 9, 10, 11, 12, 13, 14, 15, 16, 17, 18, 19, 20, 21, 22, 23, 24, or 25 couplings independently have a stereoselectivity less than about 70%. In some embodiments, each coupling independently has a stereoselectivity less than about 70%. In some embodiments, oligonucleotides and compositions of the present disclosure have high purity. In some embodiments, oligonucleotides and compositions of the present disclosure have high stereochemical purity. In some embodiments, a stereochemical purity, e.g., diastereomeric purity, is about 60%-100%. In some embodiments, a diastereomeric purity, is about 60%-100%. In some embodiments, the percentage is at least 60%, 65%, 70%, 75%, 80%, 85%, 90%, 91%, 92%, 93%, 93%, 95%, 96%, 97%, 98%, or 99%. In some embodiments, the percentage is at least 80%, 85%, 90%, 91%, 92%, 93%, 93%, 95%, 96%, 97%, 98%, or 99%. In some embodiments, the percentage is at least 90%, 91%, 92%, 93%, 93%, 95%, 96%, 97%, 98%, or 99%. In some embodiments, a diastereomeric purity is at least 60%. In some embodiments, a diastereomeric purity is at least 70%. In some embodiments, a diastereomeric purity is at least 80%. In some embodiments, a diastereomeric purity is at least 85%. In some embodiments, a diastereomeric purity is at least 90%. In some embodiments, a diastereomeric purity is at least 91%. In some embodiments, a diastereomeric purity is at least 92%. In some embodiments, a diastereomeric purity is at least 93%. In some embodiments, a diastereomeric purity is at least 94%. In some embodiments, a diastereomeric purity is at least 95%. In some embodiments, a diastereomeric purity is at least 96%. In some embodiments, a diastereomeric purity is at least 97%. In some embodiments, a diastereomeric purity is at least 98%. In some embodiments, a diastereomeric purity is at least 99%. In some embodiments, a diastereomeric purity is at least 99.5%.

[0642] In some embodiments, compounds of the present disclosure (e.g., oligonucleotides, chiral auxiliaries, etc.) comprise multiple chiral elements (e.g., multiple carbon and/or phosphorus (e.g., linkage phosphorus of chiral internucleotidic linkages) chiral centers). In some embodiments, at least 1, 2, 3, 4, 5, 6, 7, 8, 9 or more chiral elements of a provided compound (e.g., an oligonucleotide) each independently have a diastereomeric purity as described herein. In some embodiments, at least 1, 2, 3, 4, 5, 6, 7, 8, 9 or more chiral carbon centers of a provided compound each independently have a diastereomeric purity as described herein. In some embodiments, at least 1, 2, 3, 4, 5, 6, 7, 8, 9 or more chiral phosphorus centers of a provided compound each independently have a diastereomeric purity as described herein. In some embodiments, each chiral element independently has a diastereomeric purity as described herein. In some embodiments, each chiral center independently has a diastereomeric purity as described herein. In some embodiments, each chiral carbon center independently has a diastereomeric purity as described herein. In some embodiments, each chiral phosphorus center independently has a diastereomeric purity as described herein. In some embodiments, each chiral phosphorus center independently has a diastereomeric purity of at least 90%, 91%, 92%, 93%, 93%, 95%, 96%, 97%, 98%, or 99% or more.

[0643] As understood by a person having ordinary skill in the art, in some embodiments, diastereoselectivity of a coupling or diastereomeric purity of a chiral linkage phosphorus center can be assessed through the diastereoselectivity of a dimer formation or diastereomeric purity of a dimer prepared under the same or comparable conditions, wherein the dimer has the same 5′- and 3′-nucleosides and internucleotidic linkage.

[0644] Various technologies can be utilized for identifying or confirming stereochemistry of chiral elements (e.g., configuration of chiral linkage phosphorus) and/or patterns of backbone chiral centers, and/or for assessing stereoselectivity (e.g., diastereoselectivity of couple steps in oligonucleotide synthesis) and/or stereochemical purity (e.g., diastereomeric purity of internucleotidic linkages, compounds (e.g., oligonucleotides), etc.). Example technologies include NMR [e.g., 1D (one-dimensional) and/or 2D (two-dimensional) ¹H-³¹P HETCOR (heteronuclear correlation spectroscopy)], HPLC, RP-HPLC, mass spectrometry, LC-MS, and cleavage of internucleotidic linkages by stereospecific nucleases, etc., which may be utilized individually or in combination. Example useful nucleases include benzonase, micrococcal nuclease, and svPDE (snake venom phosphodiesterase), which are specific for certain internucleotidic linkages with Rp linkage phosphorus (e.g., a Rp phosphorothioate linkage); and nuclease P1, mung bean nuclease, and nuclease S1, which are specific for internucleotidic linkages with Sp linkage phosphorus (e.g., a Sp phosphorothioate linkage). Without wishing to be bound by any particular theory, the present disclosure notes that, in at least some cases, cleavage of oligonucleotides by a particular nuclease may be impacted by structural elements, e.g., chemical modifications (e.g., 2′-modifications of a sugars), base sequences, or stereochemical contexts. For example, it is observed that in some cases, benzonase and micrococcal nuclease, which are specific for internucleotidic linkages with Rp linkage phosphorus, were unable to cleave an isolated Rp phosphorothioate internucleotidic linkage flanked by Sp phosphorothioate internucleotidic linkages.

[0645] In some embodiments, oligonucleotides sharing a common base sequence, a common pattern of backbone linkages, and a common pattern of backbone chiral centers share a common pattern of backbone phosphorus modifications and a common pattern of base modifications. In some embodiments, oligonucleotide compositions sharing a common base sequence, a common pattern of backbone linkages, and a common pattern of backbone chiral centers share a common pattern of backbone phosphorus modifications and a common pattern of nucleoside modifications. In some embodiments, oligonucleotides share a common base sequence, a common pattern of backbone linkages, and a common pattern of backbone chiral centers have identical structures.

[0646] In some embodiments, the present disclosure provides an oligonucleotide composition comprising a plurality of oligonucleotides capable of directing HSD17B13 knockdown, wherein oligonucleotides of the plurality are of a particular oligonucleotide type, which composition is chirally controlled in that it is enriched, relative to a substantially racemic preparation of oligonucleotides having the same base sequence, for oligonucleotides of the particular oligonucleotide type.

[0647] In some embodiments, oligonucleotides having a common base sequence, a common pattern of backbone linkages, and a common pattern of backbone chiral centers have a common pattern of backbone phosphorus modifications and a common pattern of base modifications. In some embodiments, oligonucleotides having a common base sequence, a common pattern of backbone linkages, and a common pattern of backbone chiral centers have a common pattern of backbone phosphorus modifications and a common pattern of nucleoside modifications. In some embodiments, oligonucleotides having a common base sequence, a common pattern of backbone linkages, and a common pattern of backbone chiral centers have identical structures. In some embodiments, the present disclosure provides ds oligonucleotide targeting HSD17B13 compositions comprising a plurality of oligonucleotides. In some embodiments, the present disclosure provides chirally controlled oligonucleotide compositions of ds oligonucleotides targeting HSD17B13. In some embodiments, the present disclosure provides a ds oligonucleotide targeting HSD17B13 whose base sequence is or is complementary to a HSD17B13 sequence disclosed herein or a portion thereof (e.g., various bases sequences in Table 1, wherein each T may be independently replaced with U and vice versa). In some embodiments, the present disclosure provides a ds oligonucleotide targeting HSD17B13 whose base sequence comprises a base sequence that is or is complementary to a HSD17B13 sequence disclosed herein or a portion thereof (e.g., various bases sequences in Table 1). In some embodiments, the present disclosure provides a ds oligonucleotide targeting HSD17B13 whose base sequence comprises 15 contiguous bases of a base sequence that is or is complementary to a HSD17B13 sequence disclosed herein or a portion thereof (e.g., various bases sequences in Table 1, wherein each T may be independently replaced with U and vice versa). In some embodiments, the present disclosure provides a ds oligonucleotide targeting HSD17B13 which has a base sequence comprising 15 contiguous bases with 0-3 mismatches of a base sequence that is or is complementary to a HSD17B13 sequence disclosed herein or a portion thereof (e.g., various bases sequences in Table 1, wherein each T may be independently replaced with U and vice versa). In some embodiments, the present disclosure provides a ds oligonucleotide targeting HSD17B13 composition wherein the ds oligonucleotides targeting HSD17B13 comprise at least one chiral internucleotidic linkage which is not chirally controlled. In some embodiments, the present disclosure provides a ds oligonucleotide targeting HSD17B13 comprising a non-chirally controlled chiral internucleotidic linkage, wherein the base sequence of the ds oligonucleotide targeting HSD17B13 comprises a base sequence that is or is complementary to a HSD17B13 sequence disclosed herein or a portion thereof (e.g., various bases sequences in Table 1, wherein each T may be independently replaced with U and vice versa). In some embodiments, the present disclosure provides a ds oligonucleotide targeting HSD17B13 composition comprising a non-chirally controlled chiral internucleotidic linkage, wherein the base sequence of the ds oligonucleotide targeting HSD17B13 is a base sequence that is or is complementary to a HSD17B13 sequence disclosed herein or a portion thereof (e.g., various bases sequences in Table 1, wherein each T may be independently replaced with U and vice versa). In some embodiments, the present disclosure provides a ds oligonucleotide targeting HSD17B13 comprising a non-chirally controlled chiral internucleotidic linkage, wherein the base sequence of the ds oligonucleotide targeting HSD17B13 comprises 15 contiguous bases of a base sequence that is or is complementary to a HSD17B13 sequence disclosed herein or a portion thereof (e.g., various bases sequences in Table 1, wherein each T may be independently replaced with U and vice versa). In some embodiments, the present disclosure provides a ds oligonucleotide targeting HSD17B13 comprising a non-chirally controlled chiral internucleotidic linkage, wherein the base sequence of the ds oligonucleotides targeting HSD17B13 comprises 15 contiguous bases with 0-3 mismatches of a base sequence that is or is complementary to a HSD17B13 sequence disclosed herein or a portion thereof (e.g., various bases sequences in Table 1, wherein each T may be independently replaced with U and vice versa). In some embodiments, the present disclosure provides a ds oligonucleotide targeting HSD17B13 comprising a chirally controlled chiral internucleotidic linkage, wherein the base sequence of the ds oligonucleotide targeting HSD17B13 comprises a base sequence that is or is complementary to a HSD17B13 sequence disclosed herein or a portion thereof (e.g., various bases sequences in Table 1, wherein each T may be independently replaced with U and vice versa). In some embodiments, the present disclosure provides a ds oligonucleotide targeting HSD17B13 composition comprising a chirally controlled chiral internucleotidic linkage, wherein the base sequence of the ds oligonucleotide targeting HSD17B13 is a base sequence that is or is complementary to a HSD17B13 sequence disclosed herein or a portion thereof (e.g., various bases sequences in Table 1, wherein each T may be independently replaced with U and vice versa). In some embodiments, the present disclosure provides a ds oligonucleotide targeting HSD17B13 comprising a chirally controlled chiral internucleotidic linkage, wherein the base sequence of the ds oligonucleotide targeting HSD17B13 comprises 15 contiguous bases of a base sequence that is or is complementary to a HSD17B13 sequence disclosed herein or a portion thereof (e.g., various bases sequences in Table 1, wherein each T may be independently replaced with U and vice versa). In some embodiments, the present disclosure provides a ds oligonucleotide targeting HSD17B13 comprising a chirally controlled chiral internucleotidic linkage, wherein the base sequence of the ds oligonucleotides targeting HSD17B13 comprises 15 contiguous bases with 0-3 mismatches of a base sequence that is or is complementary to a HSD17B13 sequence disclosed herein or a portion thereof (e.g., various bases sequences in Table 1, wherein each T may be independently replaced with U and vice versa).

[0648] In some embodiments, oligonucleotides of the same oligonucleotide type have a common pattern of backbone phosphorus modifications and a common pattern of nucleoside modifications. In some embodiments, oligonucleotides of the same oligonucleotide type have a common pattern of sugar modifications. In some embodiments, oligonucleotides of the same oligonucleotide type have a common pattern of base modifications. In some embodiments, oligonucleotides of the same oligonucleotide type have a common pattern of nucleoside modifications. In some embodiments, oligonucleotides of the same oligonucleotide type have the same constitution. In many embodiments, oligonucleotides of the same oligonucleotide type are identical. In some embodiments, oligonucleotides of the same oligonucleotide type are of the same oligonucleotide (as those skilled in the art will appreciate, such oligonucleotides may each independently exist in one of the various forms of the oligonucleotide, and may be the same, or different forms of the oligonucleotide). In some embodiments, oligonucleotides of the same oligonucleotide type are each independently of the same oligonucleotide or a pharmaceutically acceptable salt thereof.

[0649] In some embodiments, a plurality of oligonucleotides or oligonucleotides of a particular oligonucleotide type in a provided oligonucleotide composition are ds oligonucleotides targeting HSD17B13. In some embodiments, the present disclosure provides a chirally controlled ds oligonucleotide targeting HSD17B13 composition comprising a plurality of ds oligonucleotides targeting HSD17B13, wherein the oligonucleotides share:
[0650] 1) a common base sequence;
[0651] 2) a common pattern of backbone linkages; and
[0652] 3) the same linkage phosphorus stereochemistry at one or more chiral internucleotidic linkages (chirally controlled internucleotidic linkages),
[0653] wherein the composition is enriched, relative to a substantially racemic preparation of oligonucleotides sharing the common base sequence and pattern of backbone linkages, for oligonucleotides of the plurality.

[0654] In some embodiments, as used herein, “one or more” or “at least one” is 1-50, 1-40, 1-30, 1-25, 1-20, 1-15, 1-10, 5-50, 5-40, 5-30, 5-25, 5-20, 5-15, 5-10, 1, 2, 3, 4, 5, 6, 7, 8, 9, 10, 11, 12, 13, 14, 15, 16, 17, 18, 19, 20, or more.

[0655] In some embodiments, an oligonucleotide type is further defined by: 4) additional chemical moiety, if any.

[0656] In some embodiments, the percentage is at least about 10%. In some embodiments, the percentage is at least about 20%. In some embodiments, the percentage is at least about 30%. In some embodiments, the percentage is at least about 40%. In some embodiments, the percentage is at least about 50%. In some embodiments, the percentage is at least about 60%. In some embodiments, the percentage is at least about 70%. In some embodiments, the percentage is at least about 75%. In some embodiments, the percentage is at least about 80%. In some embodiments, the percentage is at least about 85%. In some embodiments, the percentage is at least about 90%. In some embodiments, the percentage is at least about 91%. In some embodiments, the percentage is at least about 92%. In some embodiments, the percentage is at least about 93%. In some embodiments, the percentage is at least about 94%. In some embodiments, the percentage is at least about 95%. In some embodiments, the percentage is at least about 96%. In some embodiments, the percentage is at least about 97%. In some embodiments, the percentage is at least about 98%. In some embodiments, the percentage is at least about 99%. In some embodiments, the percentage is or is greater than (DS)^{nc}, wherein DS and nc are each independently as described in the present disclosure. In some embodiments, a plurality of oligonucleotides, e.g., ds oligonucleotides targeting HSD17B13, share the same constitution. In some embodiments, a plurality of oligonucleotides, e.g., ds oligonucleotides targeting HSD17B13, are identical (the same stereoisomer). In some embodiments, a chirally controlled oligonucleotide composition, e.g., a chirally controlled ds oligonucleotide targeting HSD17B13 composition, is a stereopure oligonucleotide composition wherein oligonucleotides of the plurality are identical (the same stereoisomer), and the composition does not contain any other stereoisomers. Those skilled in the art will appreciate that one or more other stereoisomers may exist as impurities as processes, selectivities, purifications, etc. may not achieve completeness.

[0657] In some embodiments, a provided composition is characterized in that when it is contacted with a target nucleic acid (e.g., a HSD17B13 transcript (e.g., pre-mRNA, mature mRNA, other types of RNA, etc. that hybridizes with oligonucleotides of the composition)), levels of the target nucleic acid and/or a product encoded thereby is reduced compared to that observed under a reference condition. In some embodiments, a reference condition is selected from the group consisting of absence of the composition, presence of a reference composition, and combinations thereof. In some embodiments, a reference condition is absence of the composition. In some embodiments, a reference condition is presence of a reference composition. In some embodiments, a reference composition is a composition whose oligonucleotides do not hybridize with the target nucleic acid. In some embodiments, a reference composition is a composition whose oligonucleotides do not comprise a sequence that is sufficiently complementary to the target nucleic acid. In some embodiments, a provided composition is a chirally controlled oligonucleotide composition and a reference composition is a non-chirally controlled oligonucleotide composition which is otherwise identical but is not chirally controlled (e.g., a racemic preparation of oligonucleotides of the same constitution as oligonucleotides of a plurality in the chirally controlled oligonucleotide composition).

[0658] In some embodiments, the present disclosure provides a chirally controlled ds oligonucleotide targeting HSD17B13 composition comprising a plurality of ds oligonucleotides targeting HSD17B13 capable of directing HSD17B13 knockdown, wherein the oligonucleotides share:
[0659] 1) a common base sequence,
[0660] 2) a common pattern of backbone linkages, and
[0661] 3) the same linkage phosphorus stereochemistry at one or more (e.g., 1-50, 1-40, 1-30, 1-25, 1-20, 1-15, 1-10, 5-50, 5-40, 5-30, 5-25, 5-20, 5-15, 5-10, 1, 2, 3, 4, 5, 6, 7, 8, 9, 10, 11, 12, 13, 14, 15, 16, 17, 18, 19, 20, or more) chiral internucleotidic linkages (chirally controlled internucleotidic linkages),
[0662] wherein the composition is enriched, relative to a substantially racemic preparation of oligonucleotides sharing the common base sequence and pattern of backbone linkages, for oligonucleotides of the plurality,
[0663] the oligonucleotide composition being characterized in that, when it is contacted with a HSD17B13 transcript in a HSD17B13 knockdown system, knockdown of the transcript is improved relative to that observed under reference conditions selected from the group consisting of absence of the composition, presence of a reference composition, and combinations thereof.

[0664] As noted above and understood in the art, in some embodiments, the base sequence of an oligonucleotide may refer to the identity and/or modification status of nucleoside residues (e.g., of sugar and/or base components, relative to standard naturally occurring nucleotides such as adenine, cytosine, guanosine, thymine, and uracil) in the oligonucleotide and/or to the hybridization character (i.e., the ability to hybridize with particular complementary residues) of such residues.

[0665] As demonstrated herein, oligonucleotide structural elements (e.g., patterns of sugar modifications, backbone linkages, backbone chiral centers, backbone phosphorus modifications, etc.) and combinations thereof can provide surprisingly improved properties and/or bioactivities.

[0666] In some embodiments, oligonucleotide compositions are capable of reducing the expression, level and/or activity of a target gene or a gene product thereof. In some embodiments, oligonucleotide compositions are capable of reducing in the expression, level and/or activity of a target gene or a gene product thereof by sterically blocking translation after annealing to a target gene mRNA, by cleaving mRNA (pre-mRNA or mature mRNA), and/or by altering or interfering with mRNA splicing. In some embodiments, provided ds oligonucleotide targeting HSD17B13 compositions are capable of reducing the expression, level and/or activity of a HSD17B13 target gene or a gene product thereof. In some embodiments, provided ds oligonucleotide targeting HSD17B13 compositions are capable of reducing in the expression, level and/or activity of a HSD17B13 target gene or a gene product thereof by sterically blocking translation after annealing to a HSD17B13 target gene mRNA, by cleaving HSD17B13 mRNA (pre-mRNA or mature mRNA), and/or by altering or interfering with mRNA splicing.

[0667] In some embodiments, an oligonucleotide composition, e.g., a ds oligonucleotide targeting HSD17B13 composition, is a substantially pure preparation of a single oligonucleotide stereoisomer, e.g., a ds oligonucleotide targeting HSD17B13 stereoisomer, in that oligonucleotides in the composition that are not of the oligonucleotide stereoisomer are impurities from the preparation process of said oligonucleotide stereoisomer, in some case, after certain purification procedures.

[0668] In some embodiments, the present disclosure provides oligonucleotides and oligonucleotide compositions that are chirally controlled, and in some embodiments, stereopure. For instance, in some embodiments, a provided composition contains non-random or controlled levels of one or more individual oligonucleotide types as described herein. In some embodiments, oligonucleotides of the same oligonucleotide type are identical.

### Sugars

[0669] Various sugars, including modified sugars, can be utilized in accordance with the present disclosure. In some embodiments, the present disclosure provides sugar modifications and patterns thereof optionally in combination with other structural elements (e.g., internucleotidic linkage modifications and patterns thereof, pattern of backbone chiral centers thereof, etc.) that when incorporated into oligonucleotides can provide improved properties and/or activities.

[0670] The most common naturally occurring nucleosides comprise ribose sugars (e.g., in RNA) or deoxyribose sugars (e.g., in DNA) linked to the nucleobases adenosine (A), cytosine (C), guanine (G), thymine (T) or uracil (U). In some embodiments, a sugar, e.g., various sugars in many oligonucleotides in Table 1 (unless otherwise notes), is a natural DNA sugar (in DNA nucleic acids or oligonucleotides, having the structure of

[chemical structure]

wherein a nucleobase is attached to the 1′ position, and the 3′ and 5′ positions are connected to internucleotidic linkages (as appreciated by those skilled in the art, if at the 5′-end of an oligonucleotide, the 5′ position may be connected to a 5′-end group (e.g., —OH), and if at the 3′-end of an oligonucleotide, the 3′ position may be connected to a 3′-end group (e.g., —OH). In some embodiments, a sugar is a natural RNA sugar (in RNA nucleic acids or oligonucleotides, having the structure of

[chemical structure]

wherein a nucleobase is attached to the 1′ position, and the 3′ and 5′ positions are connected to internucleotidic linkages (as appreciated by those skilled in the art, if at the 5′-end of an oligonucleotide, the 5′ position may be connected to a 5′-end group (e.g., —OH), and if at the 3′-end of an oligonucleotide, the 3′ position may be connected to a 3′-end group (e.g., —OH). In some embodiments, a sugar is a modified sugar in that it is not a natural DNA sugar or a natural RNA sugar. Among other things, modified sugars may provide improved stability. In some embodiments, modified sugars can be utilized to alter and/or optimize one or more hybridization characteristics. In some embodiments, modified sugars can be utilized to alter and/or optimize target recognition. In some embodiments, modified sugars can be utilized to optimize Tm. In some embodiments, modified sugars can be utilized to improve oligonucleotide activities.

[0671] Sugars can be bonded to internucleotidic linkages at various positions. As non-limiting examples, internucleotidic linkages can be bonded to the 2′, 3′, 4′ or 5′ positions of sugars. In some embodiments, as most commonly in natural nucleic acids, an internucleotidic linkage connects with one sugar at the 5′ position and another sugar at the 3′ position unless otherwise indicated.

[0672] In some embodiments, a sugar is an optionally substituted natural DNA or RNA sugar. In some embodiments, a sugar is optionally substituted

[chemical structure]

In some embodiments, the 2′ position is optionally substituted. In some embodiments, a sugar is

[chemical structure]

In some embodiments, a sugar has the structure of

[chemical structure]

wherein each of R^{1s}, R^{2s}, R^{3s}, R^{4s}, and R^{5s} is independently —H, a suitable substituent or suitable sugar modification (e.g., those described in U.S. Pat. Nos. 9,394,333, 9,744,183, 9,605,019, 9,982,257, US 20170037399, US 20180216108, US 20180216107, U.S. Pat. No. 9,598,458, WO 2017/062862, WO 2018/067973, WO 2017/160741, WO 2017/192679, WO 2017/210647, WO 2018/098264, WO 2018/022473, WO 2018/223056, WO 2018/223073, WO 2018/223081, WO 2018/237194, WO 2019/032607, WO 2019/055951, WO 2019/075357, WO 2019/032612, and/or WO 2020/191252, the substituents, sugar modifications, descriptions of R^{1s}, R^{2s}, R^{3s}, R^{4s}, and R^{5s}, and modified sugars of each of which are independently incorporated herein by reference). In some embodiments, a sugar has the structure of

[chemical structure]

In some embodiments, R^{4s} is —H. In some embodiments, a sugar has the structure of

[chemical structure]

wherein R^{2s} is —H, halogen, or —OR, wherein R is optionally substituted C₁₋₆ aliphatic. In some embodiments, R^{2s} is —H. In some embodiments, R^{2s} is —F. In some embodiments, R^{2s} is —OMe. In some embodiments, R^{2s} is —OCH₂CH₂OMe.

[0673] In some embodiments, a sugar has the structure of

[chemical structure]

wherein R^{2s} and R^{4s} are taken together to form -L^{s}-, wherein L^{s} is a covalent bond or optionally substituted bivalent C₁₋₆ aliphatic or heteroaliphatic having 1-4 heteroatoms. In some embodiments, each heteroatom is independently selected from nitrogen, oxygen or sulfur). In some embodiments, L^{s} is optionally substituted C2-O—CH₂—C4. In some embodiments, L^{s} is C2-O—CH₂—C4. In some embodiments, L^{s} is C2-O—(R)—CH(CH₂CH₃)—C4. In some embodiments, L^{s} is C2-O—(S)—CH(CH₂CH₃)—C4.

[0674] In some embodiments, a sugar is a bicyclic sugar, e.g., sugars wherein R^{2s} and R^{4s} are taken together to form a link as described in the present disclosure. In some embodiments, a sugar is selected from LNA sugars, BNA sugars, cEt sugars, etc. In some embodiments, a bridge is between the 2′ and 4′-carbon atoms (corresponding to R^{2s} and R^{4s} taken together with their intervening atoms to form an optionally substituted ring as described herein). In some embodiments, examples of bicyclic sugars include alpha-L-methyleneoxy (4′-CH₂—O-2′) LNA, beta-D-methyleneoxy (4′-CH₂—O-2′) LNA, ethyleneoxy (4′-(CH₂)₂—O-2′) LNA, aminooxy (4′ —CH₂—O—N(R)-2′) LNA, and oxyamino (4′-CH₂—N(R)—O-2′) LNA. In some embodiments, a bicyclic sugar, e.g., a LNA or BNA sugar, is sugar having at least one bridge between two sugar carbons. In some embodiments, a bicyclic sugar in a nucleoside may have the stereochemical configurations of alpha-L-ribofuranose or beta-D-ribofuranose. In some embodiments, a sugar is a sugar described in WO 1999014226. In some embodiments, a 4′-2′ bicyclic sugar or 4′ to 2′ bicyclic sugar is a bicyclic sugar comprising a furanose ring which comprises a bridge connecting the 2′ carbon atom and the 4′ carbon atom of the sugar ring. In some embodiments, a bicyclic sugar, e.g., a LNA or BNA sugar, comprises at least one bridge between two pentofuranosyl sugar carbons. In some embodiments, a LNA or BNA sugar, comprises at least one bridge between the 4′ and the 2′ pentofuranosyl sugar carbons.

[0675] In some embodiments, a bicyclic sugar is a sugar of alpha-L-methyleneoxy (4′-CH₂—O-2′) BNA, beta-D-methyleneoxy (4′-CH₂—O-2′) BNA, ethyleneoxy (4′-(CH₂)₂—O-2′) BNA, aminooxy (4′-CH₂—O—N(R)-2′) BNA, oxyamino (4′-CH₂—N(R)—O-2′) BNA, methyl(methyleneoxy) (4′-CH(CH₃)—O-2′) BNA (also referred to as constrained ethyl or cEt), methylene-thio (4′-CH₂—S-2′) BNA, methylene-amino (4′-CH₂—N(R)-2′) BNA, methyl carbocyclic (4′-CH₂—CH(CH₃)-2′) BNA, propylene carbocyclic (4′-(CH₂)₃-2′) BNA, or vinyl BNA.

[0676] In some embodiments, a sugar modification is 2′-OMe, 2′-MOE, 2′-LNA, 2′-F, 5′-vinyl, or S-cEt. In some embodiments, a modified sugar is a sugar of FRNA, FANA, or morpholino. In some embodiments, an oligonucleotide comprises a nucleic acid analog, e.g., GNA, LNA, PNA, TNA, F-HNA (F-THP or 3′-fluoro tetrahydropyran), MNA (mannitol nucleic acid, e.g., Leumann 2002 Bioorg. Med. Chem. 10: 841-854), ANA (anitol nucleic acid), or morpholino, or a portion thereof. In some embodiments, a sugar modification replaces a natural sugar with another cyclic or acyclic moiety. Examples of such moieties are widely known in the art, e.g., those used in morpholino, glycol nucleic acids, etc. and may be utilized in accordance with the present disclosure. As appreciated by those skilled in the art, when utilized with modified sugars, in some embodiments internucleotidic linkages may be modified, e.g., as in morpholino, PNA, etc.

[0677] In some embodiments, a sugar is a 6′-modified bicyclic sugar that have either (R) or (S)-chirality at the 6-position, e.g., those described in U.S. Pat. No. 7,399,845. In some embodiments, a sugar is a 5′-modified bicyclic sugar that has either (R) or (S)-chirality at the 5-position, e.g., those described in US 20070287831.

[0678] In some embodiments, a modified sugar contains one or more substituents at the 2′ position (typically one substituent, and often at the axial position) independently selected from —F; —CF₃, —CN, —N₃, —NO, —NO₂, —OR′, —SR′, or —N(R′)₂, wherein each R′ is independently optionally substituted C₁₋₁₀ aliphatic; —O—(C₁-C₁₀ alkyl), —S—(C₁-C₁₀ alkyl), —NH—(C₁-C₁₀ alkyl), or —N(C₁-C₁₀ alkyl)₂; —O—(C₂-C₁₀ alkenyl), —S—(C₂-C₁₀ alkenyl), —NH—(C₂-C₁₀ alkenyl), or —N(C₂-C₁₀ alkenyl)₂; —O—(C₂-C₁₀ alkynyl), —S—(C₂-C₁₀ alkynyl), —NH—(C₂-C₁₀ alkynyl), or —N(C₂-C₁₀ alkynyl)₂; or —O—(C₁-C₁₀ alkylene)-O—(C₁-C₁₀ alkyl), —O—(C₁-C₁₀ alkylene)-NH—(C₁-C₁₀ alkyl) or —O—(C₁-C₁₀ alkylene)-NH(C₁-C₁₀ alkyl)₂, —NH—(C₁-C₁₀ alkylene)-O—(C₁-C₁₀ alkyl), or —N(C₁-C₁₀ alkyl)-(C₁-C₁₀ alkylene)-O—(C₁-C₁₀ alkyl), wherein each of the alkyl, alkylene, alkenyl and alkynyl is independently and optionally substituted. In some embodiments, a substituent is —O(CH₂)ₙOCH₃, —O(CH₂)ₙNH₂, MOE, DMAOE, or DMAEOE, wherein n is from 1 to about 10. In some embodiments, a modified sugar is one described in WO 2001/088198; and Martin et al., Helv. Chim. Acta, 1995, 78, 486-504. In some embodiments, a modified sugar comprises one or more groups selected from a substituted silyl group, an RNA cleaving group, a reporter group, a fluorescent label, an intercalator, a group for improving the pharmacokinetic properties of a nucleic acid, a group for improving the pharmacodynamic properties of a nucleic acid, or other substituents having similar properties. In some embodiments, modifications are made at one or more of the 2′, 3′, 4′, or 5′ positions, including the 3′ position of the sugar on the 3′-terminal nucleoside or in the 5′ position of the 5′-terminal nucleoside.

[0679] In some embodiments, the 2′-OH of a ribose is replaced with a group selected from —H, —F; —CF₃, —CN, —N₃, —NO, —NO₂, —OR′, —SR′, or —N(R′)₂, wherein each R′ is independently described in the present disclosure; —O(C₁-C₁₀ alkyl), —S—(C₁-C₁₀ alkyl), —NH—(C₁-C₁₀ alkyl), or —N(C₁-C₁₀ alkyl)₂; —O—(C₂-C₁₀ alkenyl), —S—(C₂-C₁₀ alkenyl), —NH—(C₂-C₁₀ alkenyl), or —N(C₂-C₁₀ alkenyl)₂; —O—(C₂-C₁₀ alkynyl), —S—(C₂-C₁₀ alkynyl), —NH—(C₂-C₁₀ alkynyl), or —N(C₂-C₁₀ alkynyl)₂; or —O—(C₁-C₁₀ alkylene)-O—(C₁-C₁₀ alkyl), —O—(C₁-C₁₀ alkylene)-NH—(C₁-C₁₀ alkyl) or —O—(C₁-C₁₀ alkylene)-NH(C₁-C₁₀ alkyl)₂, —NH—(C₁-C₁₀ alkylene)-O—(C₁-C₁₀ alkyl), or —N(C₁-C₁₀ alkyl)C₁-C₁₀ alkylene)-O—(C₁-C₁₀ alkyl), wherein each of the alkyl, alkylene, alkenyl and alkynyl is independently and optionally substituted. In some embodiments, the 2′-OH is replaced with —H (deoxyribose). In some embodiments, the 2′-OH is replaced with —F. In some embodiments, the 2′-OH is replaced with —OR′. In some embodiments, the 2′-OH is replaced with —OMe. In some embodiments, the 2′-OH is replaced with —OCH₂CH₂OMe.

[0680] In some embodiments, a sugar modification is a 2′-modification. Commonly used 2′-modifications include but are not limited to 2′-OR, wherein R is optionally substituted C₁₋₆ aliphatic. In some embodiments, a modification is 2′-OR, wherein R is optionally substituted C₁₋₆ alkyl. In some embodiments, a modification is 2′-OMe. In some embodiments, a modification is 2′-MOE. In some embodiments, a 2′-modification is S-cEt. In some embodiments, a modified sugar is an LNA sugar. In some embodiments, a 2′-modification is —F. In some embodiments, a 2′-modification is FANA. In some embodiments, a 2′-modification is FRNA. In some embodiments, a sugar modification is a 5′-modification, e.g., 5′-Me. In some embodiments, a sugar modification changes the size of the sugar ring. In some embodiments, a sugar modification is the sugar moiety in FHNA.

[0681] In some embodiments, a sugar modification replaces a sugar moiety with another cyclic or acyclic moiety. Examples of such moieties are widely known in the art, including but not limited to those used in morpholino (optionally with its phosphorodiamidate linkage), glycol nucleic acids, etc.

[0682] In some embodiments, one or more of the sugars of a ds oligonucleotide targeting HSD17B13 are modified. In some embodiments, each sugar of an oligonucleotide is independently modified. In some embodiments, a modified sugar comprises a 2′-modification. In some embodiments, each modified sugar independently comprises a 2′-modification. In some embodiments, a 2′-modification is 2′-OR, wherein R is optionally substituted C₁₋₆ aliphatic. In some embodiments, a 2′-modification is a 2′-OMe. In some embodiments, a 2′-modification is a 2′-MOE. In some embodiments, a 2′-modification is an LNA sugar modification. In some embodiments, a 2′-modification is 2′-F. In some embodiments, each sugar modification is independently a 2′-modification. In some embodiments, each sugar modification is independently 2′-OR. In some embodiments, each sugar modification is independently 2′-OR, wherein R is optionally substituted C₁₋₆ alkyl. In some embodiments, each sugar modification is 2′-OMe. In some embodiments, each sugar modification is 2′-MOE. In some embodiments, each sugar modification is independently 2′-OMe or 2′-MOE. In some embodiments, each sugar modification is independently 2′-OMe, 2′-MOE, or a LNA sugar.

[0683] In some embodiments, a modified sugar is an optionally substituted ENA sugar. In some embodiments, a sugar is one described in, e.g., Seth et al., J Am Chem Soc. 2010 Oct. 27; 132(42): 14942-14950. In some embodiments, a modified sugar is a sugar in XNA (xenonucleic acid), for instance, arabinose, anhydrohexitol, threose, 2′fluoroarabinose, or cyclohexene.

[0684] Modified sugars include cyclobutyl or cyclopentyl moieties in place of a pentofuranosyl sugar. Representative examples of such modified sugars include those described in U.S. Pat. Nos. 4,981,957, 5,118,800, 5,319,080, or U.S. Pat. No. 5,359,044. In some embodiments, the oxygen atom within the ribose ring is replaced by nitrogen, sulfur, selenium, or carbon. In some embodiments, —O— is replaced with —N(R′)—, —S—, —Se— or —C(R′)₂—. In some embodiments, a modified sugar is a modified ribose wherein the oxygen atom within the ribose ring is replaced with nitrogen, and wherein the nitrogen is optionally substituted with an alkyl group (e.g., methyl, ethyl, isopropyl, etc.).

[0685] In some embodiments, sugars are connected by internucleotidic linkages, in some embodiments, modified internucleotidic linkage. In some embodiments, an internucleotidic linkage does not contain a linkage phosphorus. In some embodiments, an internucleotidic linkage is -L-. In some embodiments, an internucleotidic linkage is —OP(O)(—C≡CH)O—, —OP(O)(R)O— (e.g., R is —CH₃), 3′-NHP(O)(OH)O— 5′, 3′-OP(O)(CH₃)OCH₂— 5′, 3′-CH₂C(O)NHCH₂-5′, 3′-SCH₂OCH₂-5′, 3′-OCH₂OCH₂-5′, 3′-CH₂NR′CH₂-5′, 3′-CH₂N(Me)OCH₂-5′, 3′-NHC(O)CH₂CH₂-5′, 3′-NR′C(O)CH₂CH₂-5′, 3′-CH₂CH₂NR′-5′, 3′-CH₂CH₂NH-5′, or 3′-OCH₂CH₂N(R′)-5′. In some embodiments, a 5′ carbon may be optionally substituted with ═O.

[0686] In some embodiments, a modified sugar is an optionally substituted pentose or hexose. In some embodiments, a modified sugar is an optionally substituted pentose. In some embodiments, a modified sugar is an optionally substituted hexose. In some embodiments, a modified sugar is an optionally substituted ribose or hexitol. In some embodiments, a modified sugar is an optionally substituted ribose. In some embodiments, a modified sugar is an optionally substituted hexitol.

[0687] In some embodiments, a sugar modification is 5′-vinyl (R or S), 5′-methyl (R or S), 2′-SH, 2′-F, 2′-OCH₃, 2′-OCH₂CH₃, 2′-OCH₂CH₂F or 2′-O(CH₂)₂OCH₃. In some embodiments, a substituent at the 2′ position, e.g., a 2′-modification, is allyl, amino, azido, thio, 0-allyl, 0-C₁-C₁₀ alkyl, OCF₃, OCH₂F, O(CH₂)₂SCH₃, O(CH₂)₂—O—N(Rₘ)Rₙ), O—CH₂—C(═O)—N(Rₘ)(Rₙ), and O—CH₂—C(═O)—N(Rₗ)—(CH₂)₂—N(Rₘ)(Rₙ), wherein each allyl, amino and alkyl is optionally substituted, and each of Rₗ, Rₘ and Rₙ is independently R′ as described in the present disclosure. In some embodiments, each of Rₗ, Rₘ and Rₙ is independently —H or optionally substituted C₁-C₁₀ alkyl.

[0688] In some embodiments, a sugar is a tetrahydropyran or THP sugar. In some embodiments, a modified nucleoside is tetrahydropyran nucleoside or THP nucleoside which is a nucleoside having a six-membered tetrahydropyran sugar substituted for a pentofuranosyl residue in typical natural nucleosides. THP sugars and/or nucleosides include those used in hexitol nucleic acid (HNA), anitol nucleic acid (ANA), mannitol nucleic acid (MNA) (e.g., Leumann, Bioorg. Med. Chem., 2002, 10, 841-854) or fluoro HNA (F-HNA).

[0689] In some embodiments, sugars comprise rings having more than 5 atoms and/or more than one heteroatom, e.g., morpholino sugars.

[0690] As those skilled in the art will appreciate, modifications of sugars, nucleobases, internucleotidic linkages, etc. can and are often utilized in combination in oligonucleotides, e.g., see various oligonucleotides in Table 1. For example, a combination of sugar modification and nucleobase modification is 2′-F (sugar) 5-methyl (nucleobase) modified nucleosides. In some embodiments, a combination is replacement of a ribosyl ring oxygen atom with S and substitution at the 2′-position.

[0691] In some embodiments, a 2′-modified sugar is a furanosyl sugar modified at the 2′ position. In some embodiments, a 2′-modification is halogen, —R′ (wherein R′ is not —H), —OR′ (wherein R′ is not —H), —SR′, —N(R′)₂, optionally substituted —CH₂—CH═CH₂, optionally substituted alkenyl, or optionally substituted alkynyl. In some embodiments, a 2′-modifications is selected from —O[(CH₂)ₙO]ₘCH₃, —O(CH₂)ₙNH₂, —O(CH₂)·CH₃, —O(CH₂)ₙF, —O(CH₂)ₙONH₂, —OCH₂C(═O)N(H)CH₃, and —O(CH₂)ₙON[(CH₂)·CH₃]₂, wherein each n and m is independently from 1 to about 10. In some embodiments, a 2′-modification is optionally substituted C₁-C₁₂ alkyl, optionally substituted alkenyl, optionally substituted alkynyl, optionally substituted alkaryl, optionally substituted aralkyl, optionally substituted —O-alkaryl, optionally substituted —O-aralkyl, —SH, —SCH₃, —OCN, —Cl, —Br, —CN, —F, —CF₃, —OCF₃, —SOCH₃, —SO₂CH₃, —ONO₂, —NO₂, —N₃, —NH₂, optionally substituted heterocycloalkyl, optionally substituted heterocycloalkaryl, optionally substituted aminoalkylamino, optionally substituted polyalkylamino, substituted silyl, a reporter group, an intercalator, a group for improving pharmacokinetic properties, a group for improving the pharmacodynamic properties, and other substituents. In some embodiments, a 2′-modification is a 2′-MOE modification.

[0692] In some embodiments, a 2′-modified or 2′-substituted sugar or nucleoside is a sugar or nucleoside comprising a substituent at the 2′ position of the sugar which is other than —H (typically not considered a substituent) or —OH. In some embodiments, a 2′-modified sugar is a bicyclic sugar comprising a bridge connecting two carbon atoms of the sugar ring one of which is the 2′ carbon. In some embodiments, a 2′-modification is non-bridging, e.g., allyl, amino, azido, thio, optionally substituted —O-allyl, optionally substituted —O—C₁-C₁₀ alkyl, —OCF₃, —O(CH₂)₂OCH₃, 2′-O(CH₂)₂SCH₃, —O(CH₂)₂ON(Rₘ)(Rₙ), or —OCH₂C(═O)N(Rₘ)(Rₙ), where each Rₘ and Rₙ is independently —H or optionally substituted C₁-C₁₀ alkyl.

[0693] In some embodiments, a sugar is the sugar of N-methanocarba, LNA, cMOE BNA, cEt BNA, α-L-LNA or related analogs, HNA, Me-ANA, MOE-ANA, Ara-FHNA, FHNA, R-6′-Me-FHNA, S-6′-Me-FHNA, ENA, or c-ANA. In some embodiments, a modified internucleotidic linkage is C3-amide (e.g., sugar that has the amide modification attached to the C3′, Mutisya et al. 2014 Nucleic Acids Res. 2014 Jun. 1; 42(10): 6542-6551), formacetal, thioformacetal, MMI [e.g., methylene(methylimino), Peoc'h et al. 2006 Nucleosides and Nucleotides 16 (7-9)], a PMO (phosphorodiamidate linked morpholino) linkage (which connects two sugars), or a PNA (peptide nucleic acid) linkage.

[0694] In some embodiments, a sugar is one described in U.S. Pat. Nos. 9,394,333, 9,744,183, 9,605,019, 9,598,458, 9,982,257, U.S. Ser. No. 10/160,969, U.S. Ser. No. 10/479,995, US 2020/0056173, US 2018/0216107, US 2019/0127733, U.S. Ser. No. 10/450,568, US 2019/0077817, US 2019/0249173, US 2019/0375774, WO 2018/223056, WO 2018/223073, WO 2018/223081, WO 2018/237194, WO 2019/032607, WO 2019/055951, WO 2019/075357, WO 2019/200185, WO 2019/217784, WO 2019/032612, and/or WO 2020/191252, the sugars of each of which is incorporated herein by reference.

[0695] Various additional sugars useful for preparing oligonucleotides or analogs thereof are known in the art and may be utilized in accordance with the present disclosure.

### Nucleobases

[0696] Various nucleobases may be utilized in provided oligonucleotides in accordance with the present disclosure. In some embodiments, a nucleobase is a natural nucleobase, the most commonly occurring ones being A, T, C, G and U. In some embodiments, a nucleobase is a modified nucleobase in that it is not A, T, C, G or U. In some embodiments, a nucleobase is optionally substituted A, T, C, G or U, or a substituted tautomer of A T, C, G or U. In some embodiments, a nucleobase is optionally substituted A, T, C, G or U, e.g., 5mC, 5-hydroxymethyl C, etc. In some embodiments, a nucleobase is alkyl-substituted A, T, C, G or U. In some embodiments, a nucleobase is A. In some embodiments, a nucleobase is T. In some embodiments, a nucleobase is C. In some embodiments, a nucleobase is G. In some embodiments, a nucleobase is U. In some embodiments, a nucleobase is 5mC. In some embodiments, a nucleobase is substituted A, T, C, G or U. In some embodiments, a nucleobase is a substituted tautomer of A, T, C, G or U. In some embodiments, substitution protects certain functional groups in nucleobases to minimize undesired reactions during oligonucleotide synthesis. Suitable technologies for nucleobase protection in oligonucleotide synthesis are widely known in the art and may be utilized in accordance with the present disclosure. In some embodiments, modified nucleobases improves properties and/or activities of oligonucleotides. For example, in many cases, 5mC may be utilized in place of C to modulate certain undesired biological effects, e.g., immune responses. In some embodiments, when determining sequence identity, a substituted nucleobase having the same hydrogen-bonding pattern is treated as the same as the unsubstituted nucleobase, e.g., 5mC may be treated the same as C [e.g., an oligonucleotide having 5mC in place of C (e.g., AT5mCG) is considered to have the same base sequence as an oligonucleotide having C at the corresponding location(s) (e.g., ATCG)].

[0697] In some embodiments, an oligonucleotide comprises one or more A, T, C, G or U. In some embodiments, an oligonucleotide comprises one or more optionally substituted A, T, C, G or U. In some embodiments, an oligonucleotide comprises one or more 5-methylcytidine, 5-hydroxymethylcytidine, 5-formylcytosine, or 5-carboxylcytosine. In some embodiments, an oligonucleotide comprises one or more 5-methylcytidine. In some embodiments, each nucleobase in an oligonucleotide is selected from the group consisting of optionally substituted A, T, C, G and U, and optionally substituted tautomers of A, T, C, G and U. In some embodiments, each nucleobase in an oligonucleotide is optionally protected A, T, C, G and U. In some embodiments, each nucleobase in an oligonucleotide is optionally substituted A, T, C, G or U. In some embodiments, each nucleobase in an oligonucleotide is selected from the group consisting of A, T, C, G, U, and 5mC.

[0698] In some embodiments, a nucleobase is optionally substituted 2AP or DAP. In some embodiments, a nucleobase is optionally substituted 2AP. In some embodiments, a nucleobase is optionally substituted DAP. In some embodiments, a nucleobase is 2AP. In some embodiments, a nucleobase is DAP.

[0699] In some embodiments, a nucleobase is a natural nucleobase or a modified nucleobase derived from a natural nucleobase. Examples include uracil, thymine, adenine, cytosine, and guanine optionally having their respective amino groups protected by acyl protecting groups, 2-fluorouracil, 2-fluorocytosine, 5-bromouracil, 5-iodouracil, 2,6-diaminopurine, azacytosine, pyrimidine analogs such as pseudoisocytosine and pseudouracil and other modified nucleobases such as 8-substituted purines, xanthine, or hypoxanthine (the latter two being the natural degradation products). Certain examples of modified nucleobases are disclosed in Chiu and Rana, RNA, 2003, 9, 1034-1048, Limbach et al. Nucleic Acids Research, 1994, 22, 2183-2196 and Revankar and Rao, Comprehensive Natural Products Chemistry, vol. 7, 313. In some embodiments, a modified nucleobase is substituted uracil, thymine, adenine, cytosine, or guanine. In some embodiments, a modified nucleobase is a functional replacement, e.g., in terms of hydrogen bonding and/or base pairing, of uracil, thymine, adenine, cytosine, or guanine. In some embodiments, a nucleobase is optionally substituted uracil, thymine, adenine, cytosine, 5-methylcytosine, or guanine. In some embodiments, a nucleobase is uracil, thymine, adenine, cytosine, 5-methylcytosine, or guanine.

[0700] In some embodiments, a provided oligonucleotide comprises one or more 5-methylcytosine. In some embodiments, the present disclosure provides an oligonucleotide whose base sequence is disclosed herein, e.g., in Table 1, wherein each T may be independently replaced with U and vice versa, and each cytosine is optionally and independently replaced with 5-methylcytosine or vice versa. As appreciated by those skilled in the art, in some embodiments, 5mC may be treated as C with respect to base sequence of an oligonucleotide -such oligonucleotide comprises a nucleobase modification at the C position (e.g., see various oligonucleotides in Table 1). In description of oligonucleotides, typically unless otherwise noted, nucleobases, sugars and internucleotidic linkages are non-modified.

[0701] In some embodiments, a modified base is optionally substituted adenine, cytosine, guanine, thymine, or uracil, or a tautomer thereof. In some embodiments, a modified nucleobase is a modified adenine, cytosine, guanine, thymine or uracil, modified by one or more modifications by which:
[0702] (1) a nucleobase is modified by one or more optionally substituted groups independently selected from acyl, halogen, amino, azide, alkyl, alkenyl, alkynyl, aryl, heteroalkyl, heteroalkenyl, heteroalkynyl, heterocyclyl, heteroaryl, carboxyl, hydroxyl, biotin, avidin, streptavidin, substituted silyl, and combinations thereof;
[0703] (2) one or more atoms of a nucleobase are independently replaced with a different atom selected from carbon, nitrogen and sulfur;
[0704] (3) one or more double bonds in a nucleobase are independently hydrogenated; or
[0705] (4) one or more aryl or heteroaryl rings are independently inserted into a nucleobase.

[0706] In some embodiments, a modified nucleobase is a modified nucleobase known in the art, e.g., WO2017/210647. In some embodiments, modified nucleobases are expanded-size nucleobases in which one or more aryl and/or heteroaryl rings, such as phenyl rings, have been added.

[0707] In some embodiments, a modified nucleobase is selected from 5-substituted pyrimidines, 6-azapyrimidines, alkyl or alkynyl substituted pyrimidines, alkyl substituted purines, and N-2, N-6 and 0-6 substituted purines. In certain embodiments, modified nucleobases are selected from 2-aminopropyladenine, 5-hydroxymethyl cytosine, xanthine, hypoxanthine, 2-aminoadenine, 6-N-methylguanine, 6-N-methyladenine, 2-propyladenine, 2-thiouracil, 2-thiothymine and 2-thiocytosine, 5-propynyl (—C≡C—CH₃) uracil, 5-propynylcytosine, 6-azouracil, 6-azocytosine, 6-azothymine, 5-ribosyluracil (pseudouracil), 4-thiouracil, 8-halo, 8-amino, 8-thiol, 8-thioalkyl, 8-hydroxyl, 8-aza and other 8-substituted purines, 5-halo, particularly 5-bromo, 5-trifluoromethyl, 5-halouracil, and 5-halocytosine, 7-methylguanine, 7-methyladenine, 2-F-adenine, 2-aminoadenine, 7-deazaguanine, 7-deazaadenine, 3-deazaguanine, 3-deazaadenine, 6-N-benzoyladenine, 2-N-isobutyrylguanine, 4-N-benzoylcytosine, 4-N-benzoyluracil, 5-methyl 4-N-benzoylcytosine, 5-methyl 4-N-benzoyluracil, universal bases, hydrophobic bases, promiscuous bases, size-expanded bases, and fluorinated bases. In some embodiments, modified nucleobases are tricyclic pyrimidines, such as 1,3-diazaphenoxazine-2-one, 1,3-diazaphenothiazine-2-one or 9-(2-aminoethoxy)-1,3-diazaphenoxazine-2-one (G-clamp). In some embodiments, modified nucleobases are those in which the purine or pyrimidine base is replaced with other heterocycles, for example, 7-deaza-adenine, 7-deazaguanosine, 2-aminopyridine or 2-pyridone.

[0708] In some embodiments, a modified nucleobase is substituted. In some embodiments, a modified nucleobase is substituted such that it contains, e.g., heteroatoms, alkyl groups, or linking moieties connected to fluorescent moieties, biotin or avidin moieties, or other protein or peptides. In some embodiments, a modified nucleobase is a “universal base” that is not a nucleobase in the most classical sense, but that functions similarly to a nucleobase. One example of a universal base is 3-nitropyrrole.

[0709] In some embodiments, nucleosides that can be utilized in provided technologies comprise modified nucleobases and/or modified sugars, e.g., 4-acetylcytidine; 5-(carboxyhydroxylmethyl)uridine; 2′-O-methylcytidine; 5-carboxymethylaminomethyl-2-thiouridine; 5-carboxymethylaminomethyluridine; dihydrouridine; 2′-O-methylpseudouridine; beta,D-galactosylqueosine; 2′-O-methylguanosine; N⁶-isopentenyladenosine; 1-methyladenosine; 1-methylpseudouridine; 1-methylguanosine; 1-methylinosine; 2,2-dimethylguanosine; 2-methyladenosine; 2-methylguanosine; N⁷-methylguanosine; 3-methyl-cytidine; 5-methylcytidine; 5-hydroxymethylcytidine; 5-formylcytosine; 5-carboxylcytosine; N⁶-methyladenosine; 7-methylguanosine; 5-methylaminoethyluridine; 5-methoxyaminomethyl-2-thiouridine; beta,D-mannosylqueosine; 5-methoxycarbonylmethyluridine; 5-methoxyuridine; 2-methylthio-N⁶-isopentenyladenosine; N-((9-beta,D-ribofuranosyl-2-methylthiopurine-6-yl)carbamoyl)threonine; N-((9-beta,D-ribofuranosylpurine-6-yl)-N-methylcarbamoyl)threonine; uridine-5-oxyacetic acid methylester; uridine-5-oxyacetic acid (v); pseudouridine; queosine; 2-thiocytidine; 5-methyl-2-thiouridine; 2-thiouridine; 4-thiouridine; 5-methyluridine; 2′-O-methyl-5-methyluridine; and 2′-O-methyluridine.

[0710] In some embodiments, a nucleobase, e.g., a modified nucleobase comprises one or more biomolecule binding moieties such as e.g., antibodies, antibody fragments, biotin, avidin, streptavidin, receptor ligands, or chelating moieties. In other embodiments, a nucleobase is 5-bromouracil, 5-iodouracil, or 2,6-diaminopurine. In some embodiments, a nucleobase comprises substitution with a fluorescent or biomolecule binding moiety. In some embodiments, a substituent is a fluorescent moiety. In some embodiments, a substituent is biotin or avidin.

[0711] In some embodiments, a nucleobase is one described in U.S. Pat. Nos. 9,394,333, 9,744,183, 9,605,019, 9,598,458, 9,982,257, U.S. Ser. No. 10/160,969, U.S. Ser. No. 10/479,995, US 2020/0056173, US 2018/0216107, US 2019/0127733, U.S. Ser. No. 10/450,568, US 2019/0077817, US 2019/0249173, US 2019/0375774, WO 2018/223056, WO 2018/223073, WO 2018/223081, WO 2018/237194, WO 2019/032607, WO 2019/055951, WO 2019/075357, WO 2019/200185, WO 2019/217784, WO 2019/032612, and/or WO 2020/191252, the nucleobases of each of which is incorporated herein by reference.

### Additional Chemical Moieties

[0712] In some embodiments, a ds oligonucleotide targeting HSD17B13 comprises one or more additional chemical moieties. Various additional chemical moieties, e.g., targeting moieties, carbohydrate moieties, lipid moieties, etc. are known in the art and can be utilized in accordance with the present disclosure to modulate properties and/or activities of ds oligonucleotides targeting HSD17B13, e.g., stability, half life, activities, delivery, pharmacodynamics properties, pharmacokinetic properties, etc. In some embodiments, certain additional chemical moieties facilitate delivery of oligonucleotides to desired cells, tissues and/or organs, including but not limited the cells of the central nervous system. In some embodiments, certain additional chemical moieties facilitate internalization of oligonucleotides. In some embodiments, certain additional chemical moieties increase oligonucleotide stability. In some embodiments, the present disclosure provides technologies for incorporating various additional chemical moieties into oligonucleotides.

[0713] In certain embodiments, a ds oligonucleotide comprises an additional chemical moiety demonstrates increased delivery to and/or activity in a tissue compared to a reference oligonucleotide, e.g., a reference oligonucleotide which does not have the additional chemical moiety but is otherwise identical.

[0714] In certain embodiments, non-limiting examples of additional chemical moieties include carbohydrate moieties, targeting moieties, etc., which, when incorporated into oligonucleotides, can improve one or more properties. In certain embodiments, an additional chemical moiety is selected from: glucose, GluNAc (N-acetyl amine glucosamine) and anisamide moieties. In certain embodiments, a provided ds oligonucleotide can comprise two or more additional chemical moieties, wherein the additional chemical moieties are identical or non-identical, or are of the same category (e.g., carbohydrate moiety, sugar moiety, targeting moiety, etc.) or not of the same category.

[0715] In certain embodiments, an additional chemical moiety is a targeting moiety. In certain embodiments, an additional chemical moiety is or comprises a carbohydrate moiety. In certain embodiments, an additional chemical moiety is or comprises a lipid moiety. In certain embodiments, an additional chemical moiety is or comprises a ligand moiety for, e.g., cell receptors such as a sigma receptor, an asialoglycoprotein receptor, etc. In certain embodiments, a ligand moiety is or comprises an anisamide moiety, which may be a ligand moiety for a sigma receptor. In certain embodiments, a ligand moiety is or comprises a GalNAc moiety, which may be a ligand moiety for an asialoglycoprotein receptor. In certain embodiments, an additional chemical moiety facilitates delivery to liver.

[0716] In certain embodiments, a provided ds oligonucleotide can comprise one or more linkers and additional chemical moieties (e.g., targeting moieties), and/or can be chirally controlled or not chirally controlled, and/or have a bases sequence and/or one or more modifications and/or formats as described herein.

[0717] Various linkers, carbohydrate moieties and targeting moieties, including many known in the art, can be utilized in accordance with the present disclosure. In certain embodiments, a carbohydrate moiety is a targeting moiety. In certain embodiments, a targeting moiety is a carbohydrate moiety. In certain embodiments, a provided ds oligonucleotide comprises an additional chemical moiety suitable for delivery, e.g., glucose, GluNAc (N-acetyl amine glucosamine), anisamiide, or a structure selected from:

[chemical structure]

[chemical structure]

[chemical structure]

[0718] In certain embodiments, n is 1. In certain embodiments, n is 2. In certain embodiments, n is 3. In certain embodiments, n is 4. In certain embodiments, n is 5. In certain embodiments, n is 6. In certain embodiments, n is 7. In certain embodiments, n is 8.

[0719] In certain embodiments, additional chemical moieties are any of ones described in the Examples, including examples of various additional chemical moieties incorporated into various ds oligonucleotides.

[0720] In certain embodiments, an additional chemical moiety conjugated to a ds oligonucleotide is capable of targeting the ds oligonucleotide to a cell in the central nervous system.

[0721] In certain embodiments, an additional chemical moiety comprises or is a cell receptor ligand. In certain embodiments, an additional chemical moiety comprises or is a protein binder, e.g., one binds to a cell surface protein. Such moieties among other things can be useful for targeted delivery of ds oligonucleotides to cells expressing the corresponding receptors or proteins. In certain embodiments, an additional chemical moiety of a provided ds oligonucleotide comprises anisamide or a derivative or an analog thereof and is capable of targeting the ds oligonucleotide to a cell expressing a particular receptor, such as the sigma 1 receptor.

[0722] In certain embodiments, a provided ds oligonucleotide is formulated for administration to a body cell and/or tissue expressing its target. In certain embodiments, an additional chemical moiety conjugated to a ds oligonucleotide is capable of targeting the oligonucleotide to a cell.

[0723] In certain embodiments, an additional chemical moiety is selected from optionally substituted phenyl,

[chemical structure]

wherein n′ is 1, 2, 3, 4, 5, 6, 7, 8, 9, or 10, and each other variable is as described in the present disclosure. In certain embodiments, R^{s} is F. In certain embodiments, R^{s} is OMe. In certain embodiments, R^{s} is OH. In certain embodiments, R^{s} is NHAc. In certain embodiments, R^{s} is NHCOCF₃. In certain embodiments, R′ is H. In certain embodiments, R is H. In certain embodiments, R^{2s} is NHAc, and R^{5s} is OH. In certain embodiments, R^{2s} is p-anisoyl, and R^{5s} is OH. In certain embodiments, R^{2s} is NHAc and R^{5s} is p-anisoyl. In certain embodiments, R^{2s} is OH, and R^{5s} is p-anisoyl. In certain embodiments, an additional chemical moiety is selected from

[chemical structure]

[chemical structure]

[chemical structure]

In certain embodiments, n′ is 1. In certain embodiments, n′ is 0. In certain embodiments, n″ is 1. In certain embodiments, n″ is 2.

[0724] In certain embodiments, an additional chemical moiety is or comprises an asialoglycoprotein receptor (ASGPR) ligand.

[0725] Without wishing to be bound by any particular theory, the present disclosure notes that ASGPR1 has also been reported to be expressed in the hippocampus region and/or cerebellum Purkinje cell layer of the mouse. http://mouse.brain-map.org/experiment/show/2048

[0726] Various other ASGPR ligands are known in the art and can be utilized in accordance with the present disclosure. In certain embodiments, an ASGPR ligand is a carbohydrate. In certain embodiments, an ASGPR ligand is GalNac or a derivative or an analog thereof. In certain embodiments, an ASGPR ligand is one described in Sanhueza et al. J. Am. Chem. Soc., 2017, 139 (9), pp 3528-3536. In certain embodiments, an ASGPR ligand is one described in Mamidyala et al. J. Am. Chem. Soc., 2012, 134, pp 1978-1981. In certain embodiments, an ASGPR ligand is one described in US 20160207953. In certain embodiments, an ASGPR ligand is a substituted-6,8-dioxabicyclo[3.2.1]octane-2,3-diol derivative disclosed in, e.g., US 20160207953. In certain embodiments, an ASGPR ligand is one described in, e.g., US 20150329555. In certain embodiments, an ASGPR ligand is a substituted-6,8-dioxabicyclo[3.2.1]octane-2,3-diol derivative disclosed e.g., in US 20150329555. In certain embodiments, an ASGPR ligand is one described in U.S. Pat. No. 8,877,917, US 20160376585, U.S. Ser. No. 10/086,081, or U.S. Pat. No. 8,106,022. ASGPR ligands described in these documents are incorporated herein by reference. Those skilled in the art will appreciate that various technologies are known in the art, including those described in these documents, for assessing binding of a chemical moiety to ASGPR and can be utilized in accordance with the present disclosure. In certain embodiments, a provided ds oligonucleotide is conjugated to an ASGPR ligand. In certain embodiments, a provided ds oligonucleotide comprises an ASGPR ligand. In certain embodiments, an additional chemical moiety comprises an ASGPR ligand is

[chemical structure]

wherein each variable is independently as described in the present disclosure. In certain embodiments, R is —H. In certain embodiments, R′ is —C(O)R.

[0727] In certain embodiments, an additional chemical moiety is or comprises

[chemical structure]

In certain embodiments, an additional chemical moiety is or comprises

[chemical structure]

In certain embodiments, an additional chemical moiety is or comprises

[chemical structure]

In certain embodiments, an additional chemical moiety is or comprises

[chemical structure]

In certain embodiments, an additional chemical moiety is or comprises optionally substituted

[chemical structure]

In certain embodiments, an additional chemical moiety is or comprises

[chemical structure]

In certain embodiments, an additional chemical moiety is or comprises [symbol] . In certain embodiments, an additional chemical moiety is or comprises

[chemical structure]

In certain embodiments, an additional chemical moiety is or comprises

[chemical structure]

In certain embodiments, an additional chemical moiety is or comprises

[chemical structure]

[0728] In certain embodiments, an additional chemical moiety comprises one or more moieties that can bind to, e.g., oligonucleotide target cells. For example, in certain embodiments, an additional chemistry moiety comprises one or more protein ligand moieties, e.g., in certain embodiments, an additional chemical moiety comprises multiple moieties, each of which independently is an ASGPR ligand. In certain embodiments, as in Mod001, Mod083, Mod071, Mod153, and Mod155, an additional chemical moiety comprises three such ligands.

[chemical structure]

[chemical structure]

Mod152 (in certain embodiments, —C(O)— connects to —NH— of a linker such as Mod153):

[chemical structure]

Mod154 (in certain embodiments, —C(O)— connects to —NH— of a linker such as Mod155):

[chemical structure]

[0729] In some embodiments, an oligonucleotide comprises

[chemical structure]

In some embodiments, the —CH₂— connection site is utilized as a C5 connection site in a sugar. In some embodiments, the connection site on the ring is utilized as a C3 connection site in a sugar. Such moieties may be introduced utilizing, e.g., phosphoramidites (those skilled in the art appreciate that one or more groups, such as protection groups for —OH, —NH₂—, —N(i-Pr)₂, —OCH₂CH₂CN, etc., may be alternatively utilized, and protection groups can be removed under various suitable conditions, sometimes during oligonucleotide de-protection and/or cleavage steps). In some embodiments, an oligonucleotide comprises 2, 3 or more (e.g., 3 and no more than 3). In some embodiments, an oligonucleotide comprises 2, 3 or more (e.g., 3 and no more than 3). In some embodiments, copies of such moieties are linked by internucleotidic linkages, e.g., natural phosphate linkages, as described herein. In some embodiments, when at a 5′-end, a —CH₂-connection site is bonded to —OH. In some embodiments, each —OR′ is —OAc, and —N(R′)₂ is —NHAc.

[0730] In certain embodiments, an additional chemical moiety is a Mod group described herein, e.g., in Table 1.

[0731] In certain embodiments, an additional chemical moiety is Mod001. In certain embodiments, an additional chemical moiety is Mod083. In certain embodiments, an additional chemical moiety, e.g., a Mod group, is directly conjugated (e.g., without a linker) to the remainder of the ds oligonucleotide. In certain embodiments, an additional chemical moiety is conjugated via a linker to the remainder of the ds oligonucleotide. In certain embodiments, additional chemical moieties, e.g., Mod groups, may be directly connected, and/or via a linker, to nucleobases, sugars and/or internucleotidic linkages of ds oligonucleotides. In certain embodiments, Mod groups are connected, either directly or via a linker, to sugars. In certain embodiments, Mod groups are connected, either directly or via a linker, to 5′-end sugars. In certain embodiments, Mod groups are connected, either directly or via a linker, to 5′-end sugars via 5′ carbon. For examples, see various ds oligonucleotides in Table 1. In certain embodiments, Mod groups are connected, either directly or via a linker, to 3′-end sugars. In certain embodiments, Mod groups are connected, either directly or via a linker, to 3′-end sugars via 3′ carbon. In certain embodiments, Mod groups are connected, either directly or via a linker, to nucleobases. In certain embodiments, Mod groups are connected, either directly or via a linker, to internucleotidic linkages. In certain embodiments, provided oligonucleotides comprise Mod001 connected to 5′-end of oligonucleotide chains through L001.

[0732] As appreciated by those skilled in the art, an additional chemical moiety may be connected to a ds oligonucleotide chain at various locations, e.g., 5′-end, 3′-end, or a location in the middle (e.g., on a sugar, a base, an internucleotidic linkage, etc.). In certain embodiments, it is connected at a 5′-end. In certain embodiments, it is connected at a 3′-end. In certain embodiments, it is connected at a nucleotide in the middle.

[0733] Certain additional chemical moieties (e.g., lipid moieties, targeting moieties, carbohydrate moieties), including but not limited to Mod012, Mod039, Mod062, Mod085, Mod086, and Mod094, and various linkers for connecting additional chemical moieties to ds oligonucleotide chains, including but not limited to L001, L003, L004, L008, L009, and L010, are described in WO 2017/062862, WO 2018/067973, WO 2017/160741, WO 2017/192679, WO 2017/210647, WO 2018/098264, WO 2018/022473, WO 2018/223056, WO 2018/223073, WO 2018/223081, WO 2018/237194, WO 2019/032607, WO2019032612, WO 2019/055951, WO 2019/075357, WO 2019/200185, WO 2019/217784, and/or WO 2019/032612, the additional chemical moieties and linkers of each of which are independently incorporated herein by reference, and can be utilized in accordance with the present disclosure. In certain embodiments, an additional chemical moiety is digoxigenin or biotin or a derivative thereof.

[0734] In certain embodiments, a ds oligonucleotide comprises a linker, e.g., L001 L004, L008, and/or an additional chemical moiety, e.g., Mod012, Mod039, Mod062, Mod085, Mod086, or Mod094. In certain embodiments, a linker, e.g., L001, L003, L004, L008, L009, L110, etc. is linked to a Mod, e.g., Mod012, Mod039, Mod062, Mod085, Mod086, Mod094, Mod152, Mod153, Mod154, Mod155 etc. L001: —NH—(CH₂)₆— linker (also known as a C6 linker, C6 amine linker or C₆ amino linker), connected to Mod, if any, through —NH—, and the 5′-end or 3′-end of the ds oligonucleotide chain through either a phosphate linkage (—O—P(O)(OH)—O—, which may exist as a salt form, and may be indicated as O or PO) or a phosphorothioate linkage (—O—P(O)(SH)—O—, which may exist as a salt form, and may be indicated as * if the phosphorothioate is not chirally controlled; or *S, S, or Sp, if the phosphorothioate is chirally controlled and has an Sp configuration, or *R, R, or Rp, if the phosphorothioate is chirally controlled and has an Rp configuration) as indicated at the —CH₂— connecting site. If no Mod is present, L001 is connected to —H through —NH—;
[0735] L003:

[chemical structure]

linker. In certain embodiments, it is connected to Mod, if any (if no Mod, —H), through its amino group, and the 5′-end or 3′-end of an oligonucleotide chain e.g., via a linkage (e.g., a phosphate linkage (O or PO) or a phosphorothioate linkage (can be either not chirally controlled or chirally controlled (Sp or Rp))); L004: linker having the structure of —NH(CH₂)₄CH(CH₂OH)CH₂—, wherein —NH— is connected to Mod (through —C(O)—) or —H, and the —CH₂— connecting site is connected to an oligonucleotide chain (e.g., at the 3′-end) through a linkage, e.g., phosphodiester (—O—P(O)(OH)—O—, which may exist as a salt form, and may be indicated as O or PO), phosphorothioate (—O—P(O)(SH)—O—, which may exist as a salt form, and may be indicated as * if the phosphorothioate is not chirally controlled; or *S, S, or Sp, if the phosphorothioate is chirally controlled and has an Sp configuration, or *R, R, or Rp, if the phosphorothioate is chirally controlled and has an Rp configuration), or phosphorodithioate (—O—P(S)(SH)—O—, which may exist as a salt form, and may be indicated as PS2 or: or D) linkage. For example, an asterisk immediately preceding a L004 (e.g., *L004) indicates that the linkage is a phosphorothioate linkage, and the absence of an asterisk immediately preceding L004 indicates that the linkage is a phosphodiester linkage. For example, in an oligonucleotide which terminates in . . . mAL004, the linker L004 is connected (via the —CH₂— site) through a phosphodiester linkage to the 3′ position of the 3′-terminal sugar (which is 2′-OMe modified and connected to the nucleobase A), and the L004 linker is connected via —NH— to —H. Similarly, in one or more oligonucleotides, the L004 linker is connected (via the —CH₂— site) through the phosphodiester linkage to the 3′ position of the 3′-terminal sugar, and the L004 is connected via —NH— to, e.g., Mod012, Mod085, Mod086, etc.; L008: linker having the structure of —C(O)—(CH₂)₉—, wherein —C(O)— is connected to Mod (through —NH—) or —OH (if no Mod indicated), and the —CH₂— connecting site is connected to an oligonucleotide chain (e.g., at the 5′-end) through a linkage, e.g., phosphodiester (—O—P(O)(OH)—O—, which may exist as a salt form, and may be indicated as O or PO), phosphorothioate (—O—P(O)(SH)—O—, which may exist as a salt form, and may be indicated as * if the phosphorothioate is not chirally controlled; or *S, S, or Sp, if the phosphorothioate is chirally controlled and has an Sp configuration, or *R, R, or Rp, if the phosphorothioate is chirally controlled and has an Rp configuration), or phosphorodithioate (—O—P(S)(SH)—O—, which may exist as a salt form, and may be indicated as PS2 or: or D) linkage. For example, in an example oligonucleotide which has the sequence of 5′-L008 mN * mN * mN * mN * N * N * N * N * N * N * N * N * N * N * mN * mN * mN * mN-3′, and which has a Stereochemistry/Linkage of OXXXXXXXXX XXXXXXXX, wherein N is a base, wherein O is a natural phosphate internucleotidic linkage, and wherein X is a stereorandom phosphorothioate, L008 is connected to —OH through —C(O)—, and the 5′-end of an oligonucleotide chain through a phosphate linkage (indicated as “0” in “Stereochemistry/Linkage”); in another example oligonucleotide, which has the sequence of 5′-Mod062L008 mN * mN* mN * mN * N * N * N * N * N * N * N * N * N * N * N * mN * mN * mN-3′, and which has a Stereochemistry/Linkage of OXXXXXXXXXXXXXXXXX, wherein N is a base, L008 is connected to Mod062 through —C(O)—, and the 5′-end of an oligonucleotide chain through a phosphate linkage (indicated as “0” in “Stereochemistry/Linkage”);
[0736] L009: —CH₂CH₂CH₂—. In certain embodiments, when L009 is present at the 5′-end of an oligonucleotide without a Mod, one end of L009 is connected to —OH and the other end connected to a 5′-carbon of the oligonucleotide chain e.g., via a linkage (e.g., a phosphate linkage (O or PO) or a phosphorothioate linkage (can be either not chirally controlled or chirally controlled (Sp or Rp))); L0110:

[chemical structure]

In certain embodiments, when L010 is present at the 5′-end of an oligonucleotide without a Mod, the 5′-carbon of LOW is connected to —OH and the 3′-carbon connected to a 5′-carbon of the oligonucleotide chain e.g., via a linkage (e.g., a phosphate linkage (O or PO) or a phosphorothioate linkage (can be either not chirally controlled or chirally controlled (Sp or Rp))); Mod012 (in certain embodiments, —C(O)-connects to —NH— of a linker such as L001, L004, L008, etc.):
[0737] L010 is utilized with n001R to form L010n001R, which has the structure of

[chemical structure]

and wherein the configuration of linkage phosphorus is Rp. In some embodiments, multiple L010n001R may be utilized. For example, L023L010n001RL010n001RL010n001R, which has the following structure (which is bonded to the 5′-carbon at the 5′-end of the oligonucleotide chain, and each linkage phosphorus is independently Rp):

[chemical structure]

[0738] L023 is utilized with n001 to form L023n001, which has the structure of

[chemical structure]

[0739] L023 is utilized with n009 to form L023n009, as in WV-42644 which has the structure of

[chemical structure]

[0740] In some embodiments, L023n001L009n001L009n001 may be utilized. For example, L023n001L009n001L009n001 as in WV-42643

[chemical structure]

[0741] In some embodiments, L023n009L009n009 may be utilized. For example, as in WV-42646

[chemical structure]

[0742] In some embodiments, L023n009L009n009L009n009 may be utilized. For example, as in WV-42648

[chemical structure]

[0743] In some embodiments L025 may be utilized; as in WV-41390,

[chemical structure]

wherein the —CH₂— connection site is utilized as a C₅ connection site of a sugar (e.g., a DNA sugar) and is connected to another unit (e.g., 3′ of a sugar), and the connection site on the ring is utilized as a C₃ connection site and is connected to another unit (e.g., a 5′-carbon of a carbon), each of which is independently, e.g., via a linkage (e.g., a phosphate linkage (O or PO) or a phosphorothioate linkage (can be either not chirally controlled or chirally controlled (Sp or Rp))). When L025 is at a5′-end without any modifications, its —CH₂— connection site is bonded to —OH. For example, L025L025L025—in various oligonucleotides has the structure of

[chemical structure]

(may exist as various salt forms) and is connected to 5′-carbon of an oligonucleotide chain via a linkage as indicated (e.g., a phosphate linkage (O or PO) or a phosphorothioate linkage (can be either not chirally controlled or chirally controlled (Sp or Rp)));

[0744] In some embodiments L026 may be utilized; as in WV-44444,

[chemical structure]

[0745] In some embodiments L027 may be utilized; as in WV-44445,

[chemical structure]

[0746] In some embodiments mU may be utilized; as in WV-42079,

[chemical structure]

[0747] In some embodiments fU may be utilized; as in WV-44433,

[chemical structure]

[0748] In some embodiments dT may be utilized; as in WV-44434,

[chemical structure]

[0749] In some embodiments POdT or PO4-dT may be utilized; as in WV-44435,

[chemical structure]

[0750] In some embodiments PO5MRdT may be utilized; as in WV-44436,

[chemical structure]

[0751] In some embodiments PO5MSdT may be utilized; as in WV-44437,

[chemical structure]

[0752] In some embodiments VPdT may be utilized; as in WV-44438,

[chemical structure]

[0753] In some embodiments 5mvpdT may be utilized; as in WV-44439,

[chemical structure]

[0754] In some embodiments 5mrpdT may be utilized; as in WV-44440,

[chemical structure]

[0755] In some embodiments 5mspdT may be utilized; as in WV-44441,

[chemical structure]

[0756] In some embodiments PNdT may be utilized; as in WV-44442,

[chemical structure]

[0757] In some embodiments SPNdT may be utilized; as in WV-44443,

[chemical structure]

[0758] In some embodiments 5ptzdT may be utilized; as in WV-44446,

[chemical structure]

[chemical structure]

Mod039 (in certain embodiments, —C(O)— connects to —NH— of a linker such as L001, L003, L004, L008, L009, L110, etc.):

[chemical structure]

Mod062 (in certain embodiments, —C(O)— connects to —NH— of a linker such as L001, L003, L004, L008, L009, L110, etc.):

[chemical structure]

Mod085 (in certain embodiments, —C(O)— connects to —NH— of a linker such as L001, L003, L004, L008, L009, L110, etc.):

[chemical structure]

Mod086 (in certain embodiments, —C(O)-connects to —NH— of a linker such as L001, L003, L004, L008, L009, L110, etc.):

[chemical structure]

Mod094 (in certain embodiments, connects to an internucleotidic linkage, or to the 5′-end or 3′-end of an oligonucleotide via a linkage, e.g., a phosphate linkage, a phosphorothioate linkage (which is optionally chirally controlled), etc. For example, in an example oligonucleotide which has the sequence of 5′-mN * mN * mN * mN* N * N * N * N * N * N * N * N * N * N * mN * mN* mN * mNMod094-3′, and which has a Stereochemistry/Linkage of XXXXX XXXXX XXXXX XXO, wherein N is a base, Mod094 is connected to the 3′-end of the oligonucleotide chain (3′-carbon of the 3′-end sugar) through a phosphate group (which is not shown below and which may exist as a salt form; and which is indicated as “0” in “Stereochemistry/Linkage” ( . . . XXXXO))):

[chemical structure]

[0759] In certain embodiments, an additional chemical moiety is one described in WO 2012/030683. In certain embodiments, a provided ds oligonucleotide comprises a chemical structure (e.g., a linker, lipid, solubilizing group, and/or targeting ligand) described in WO 2012/030683.

[0760] In certain embodiments, a provided ds oligonucleotide comprises an additional chemical moiety and/or a modification (e.g., of nucleobase, sugar, internucleotidic linkage, etc.) described in: U.S. Pat. Nos. 5,688,941; 6,294,664; 6,320,017; 6,576,752; 5,258,506; 5,591,584; 4,958,013; 5,082,830; 5,118,802; 5,138,045; 6,783,931; 5,254,469; 5,414,077; 5,486,603; 5,112,963; 5,599,928; 6,900,297; 5,214,136; 5,109,124; 5,512,439; 4,667,025; 5,525,465; 5,514,785; 5,565,552; 5,541,313; 5,545,730; 4,835,263; 4,876,335; 5,578,717; 5,580,731; 5,451,463; 5,510,475; 4,904,582; 5,082,830; 4,762,779; 4,789,737; 4,824,941; 4,828,979; 5,595,726; 5,214,136; 5,245,022; 5,317,098; 5,371,241; 5,391,723; 4,948,882; 5,218,105; 5,112,963; 5,567,810; 5,574,142; 5,578,718; 5,608,046; 4,587,044; 4,605,735; 5,585,481; 5,292,873; 5,552,538; 5,512,667; 5,597,696; 5,599,923; 7,037,646; 5,587,371; 5,416,203; 5,262,536; 5,272,250; or 8,106,022.

[0761] In certain embodiments, an additional chemical moiety, e.g., a Mod, is connected via a linker. Various linkers are available in the art and may be utilized in accordance with the present disclosure, for example, those utilized for conjugation of various moieties with proteins (e.g., with antibodies to form antibody-drug conjugates), nucleic acids, etc. Certain useful linkers are described in U.S. Pat. No. 9,982,257, US 20170037399, US 20180216108, US 20180216107, U.S. Pat. No. 9,598,458, WO 2017/062862, WO 2018/067973, WO 2017/160741, WO 2017/192679, WO 2017/210647, WO 2018/098264, WO 2018/223056, WO 2018/237194, WO 2019/032607, WO 2019/055951, WO 2019/075357, WO 2019/200185, WO 2019/217784, and/or WO 2019/032612, the linker moieties of each which are independently incorporated herein by reference. In certain embodiments, a linker is, as non-limiting examples, L001, L004, L009 or L010. In certain embodiments, an oligonucleotide comprises a linker, but not an additional chemical moiety other than the linker. In certain embodiments, a ds oligonucleotide comprises a linker, but not an additional chemical moiety other than the linker, wherein the linker is L001, L004, L009, or L010.

[0762] As demonstrated herein, provided technologies can provide high levels of activities and/or desired properties, in certain embodiments, without utilizing particular structural elements (e.g., modifications, linkage configurations and/or patterns, etc.) reported to be desired and/or necessary (e.g., those reported in WO 2019/219581), though certain such structural elements may be incorporated into ds oligonucleotides in combination with various other structural elements in accordance with the present disclosure. For example, in certain embodiments, ds oligonucleotides of the present disclosure have fewer nucleosides 3′ to a nucleoside opposite to a target nucleoside (e.g., a target adenosine), contain one or more phosphorothioate internucleotidic linkages at one or more positions where a phosphorothioate internucleotidic linkage was reportedly not favored or not allowed, contain one or more Sp phosphorothioate internucleotidic linkages at one or more positions where a Sp phosphorothioate internucleotidic linkage was reportedly not favored or not allowed, contain one or more Rp phosphorothioate internucleotidic linkages at one or more positions where a Rp phosphorothioate internucleotidic linkage was reportedly not favored or not allowed, and/or contain different modifications (e.g., internucleotidic linkage modifications, sugar modifications, etc.) and/or stereochemistry at one or more locations compared to those reportedly favorable or required for certain oligonucleotide properties and/or activities (e.g., presence of 2′-MOE, absence of phosphorothioate linkages at certain positions, absence of Sp phosphorothioate linkages at certain positions, and/or absence of Rp phosphorothioate linkages at certain positions were reportedly favorable or required for certain oligonucleotide properties and/or activities; as demonstrated herein, provided technologies can provide desired properties and/or high activities without utilizing 2′-MOE, without avoiding phosphorothioate linkages at one or more such certain positions, without avoiding Sp phosphorothioate linkages at one or more such certain positions, and/or without avoiding Rp phosphorothioate linkages at one or more such certain positions). Additionally or alternatively, provided ds oligonucleotides incorporates structural elements that were not previously recognized such as utilization of certain modifications (e.g., base modifications, sugar modifications (e.g., 2′-F), linkage modifications (e.g., non-negatively charged internucleotidic linkages), additional moieties, etc.) and levels, patterns, and combinations thereof.

[0763] For example, in certain embodiments, as described herein, provided d oligonucleotides contain no more than 5, 6, 7, 8, 9, 10, 11 or 12 nucleosides 3′ to a nucleoside opposite to a target nucleoside (e.g., a target adenosine).

[0764] Alternatively or additionally, as described herein (e.g., illustrated in certain Examples), for structural elements 3′ to a nucleoside opposite to a target nucleoside (e.g., a target adenosine), in certain embodiments, about 50%-100% (e.g., about or at least about 50%, 55%, 60%, 65%, 70%, 75%, 80%, 85%, 90%, 95%) of internucleotidic linkages 3′ to a nucleoside opposite to a target nucleoside (e.g., a target adenosine) are each independently a modified internucleotidic linkage, which is optionally chirally controlled. In certain embodiments, no more than 1, 2, or 3 internucleotidic linkages 3′ to a nucleoside opposite to a target nucleoside are natural phosphate linkages. In certain embodiments, no such internucleotidic linkage is natural phosphate linkages. In certain embodiments, no more than 1 such internucleotidic linkage is natural phosphate linkages. In certain embodiments, no more than 2 such internucleotidic linkages are natural phosphate linkages. In certain embodiments, no more than 3 such internucleotidic linkages are natural phosphate linkages. In certain embodiments, each modified internucleotidic linkage is independently a phosphorothioate or a non-negatively charged internucleotidic linkage (e.g., n001). In certain embodiments, each phosphorothioate internucleotidic linkage is chirally controlled. In certain embodiments, no more than 1, 2, or 3 internucleotidic linkages 3′ to a nucleoside opposite to a target nucleoside are Rp phosphorothioate internucleotidic linkage.

[0765] Alternatively or additionally, as described herein (e.g., illustrated in certain Examples), in certain embodiments, about 50%-100% (e.g., about or at least about 50%, 55%, 60%, 65%, 70%, 75%, 80%, 85%, 90%, or 95%) of internucleotidic linkages 5′ to a nucleoside opposite to a target nucleoside (e.g., a target adenosine) are each independently a modified internucleotidic linkage, which is optionally chirally controlled. In certain embodiments, no or no more than 1, 2, or 3 internucleotidic linkages 5′ to a nucleoside opposite to a target nucleoside (e.g., a target adenosine) are not modified internucleotidic linkages. In certain embodiments, no or no more than 1, 2, or 3 internucleotidic linkages 5′ to a nucleoside opposite to a target nucleoside (e.g., a target adenosine) are not phosphorothioate internucleotidic linkages. In certain embodiments, no or no more than 1, 2, or 3 internucleotidic linkages 5′ to a nucleoside opposite to a target nucleoside (e.g., a target adenosine) are not Sp phosphorothioate internucleotidic linkages. In certain embodiments, no more than 1, 2, or 3 internucleotidic linkages 5′ to a nucleoside opposite to a target nucleoside (e.g., a target adenosine) are natural phosphate linkages. In certain embodiments, no such internucleotidic linkage is natural phosphate linkages. In certain embodiments, no more than 1 such internucleotidic linkage is natural phosphate linkages. In certain embodiments, no more than 2 such internucleotidic linkages are natural phosphate linkages. In certain embodiments, no more than 3 such internucleotidic linkages are natural phosphate linkages. In certain embodiments, each modified internucleotidic linkage is independently a phosphorothioate or a non-negatively charged internucleotidic linkage (e.g., n001). In certain embodiments, there are no 2, 3, or 4 consecutive internucleotidic linkages 5′ to a nucleoside opposite to a target nucleoside, each of which is not a phosphorothioate internucleotidic linkage. In certain embodiments, there are no 2, 3, or 4 consecutive internucleotidic linkages 5′ to a nucleoside opposite to a target nucleoside, each of which is chirally controlled and is not a Sp phosphorothioate internucleotidic linkage. In certain embodiments, no or no more than 1, 2, 3, 4, or 5 internucleotidic linkages 5′ to a nucleoside opposite to a target nucleoside (e.g., a target adenosine) are Rp phosphorothioate internucleotidic linkage. In certain embodiments, at least about 1, 2, 3, 4, 5, 6, 7, 8, 9, or 10, or about 1, 2, 3, 4, 5, 6, 7, 8, 9, 10, 11, 12, 13, 14, 15, 16, 18, 19, 20, 21, 22, 23, 24, 25, 26, 27, 28, 29, 30, 31, or 32, or about 50%-100% (e.g., about or at least about 50%, 55%, 60%, 65%, 70%, 75%, 80%, 85%, 90%, or 95%) of internucleotidic linkages 5′ to a nucleoside opposite to a target nucleoside (e.g., a target adenosine) are each independently chirally controlled and a Sp internucleotidic linkage. In certain embodiments, at least about 1, 2, 3, 4, 5, 6, 7, 8, 9, or 10, or about 1, 2, 3, 4, 5, 6, 7, 8, 9, 10, 11, 12, 13, 14, 15, 16, 18, 19, 20, 21, 22, 23, 24, 25, 26, 27, 28, 29, 30, 31, or 32, or about 50%-100% (e.g., about or at least about 50%, 55%, 60%, 65%, 70%, 75%, 80%, 85%, 90%, or 95%) of phosphorothioate internucleotidic linkages 5′ to a nucleoside opposite to a target nucleoside (e.g., a target adenosine) are each independently chirally controlled and are Sp. In certain embodiments, each phosphorothioate internucleotidic linkages 5′ to a nucleoside opposite to a target nucleoside (e.g., a target adenosine) is chirally controlled. In certain embodiments, each phosphorothioate internucleotidic linkages 5′ to a nucleoside opposite to a target nucleoside (e.g., a target adenosine) is Sp.

### Production of Oligonucleotides and Compositions

[0766] Various methods can be utilized for production of oligonucleotides and compositions and can be utilized in accordance with the present disclosure. For example, traditional phosphoramidite chemistry can be utilized to prepare stereorandom oligonucleotides and compositions, and certain reagents and chirally controlled technologies can be utilized to prepare chirally controlled oligonucleotide compositions, e.g., as described in U.S. Pat. Nos. 9,394,333, 9,744,183, 9,605,019, 9,598,458, 9,982,257, U.S. Ser. No. 10/160,969, U.S. Ser. No. 10/479,995, US 2020/0056173, US 2018/0216107, US 2019/0127733, U.S. Ser. No. 10/450,568, US 2019/0077817, US 2019/0249173, US 2019/0375774, WO 2018/223056, WO 2018/223073, WO 2018/223081, WO 2018/237194, WO 2019/032607, WO 2019/055951, WO 2019/075357, WO 2019/200185, WO 2019/217784, WO 2019/032612, and/or WO 2020/191252, the reagents and methods of each of which is incorporated herein by reference.

[0767] In some embodiments, chirally controlled/stereoselective preparation of oligonucleotides and compositions thereof comprise utilization of a chiral auxiliary, e.g., as part of monomeric phosphoramidites. Examples of such chiral auxiliary reagents and phosphoramidites are described in U.S. Pat. Nos. 9,394,333, 9,744,183, 9,605,019, 9,598,458, 9,982,257, U.S. Ser. No. 10/160,969, U.S. Ser. No. 10/479,995, US 2020/0056173, US 2018/0216107, US 2019/0127733, U.S. Ser. No. 10/450,568, US 2019/0077817, US 2019/0249173, US 2019/0375774, WO 2018/223056, WO 2018/223073, WO 2018/223081, WO 2018/237194, WO 2019/032607, WO 2019/055951, WO 2019/075357, WO 2019/200185, WO 2019/217784, WO 2019/032612, and/or WO 2020/191252, the chiral auxiliary reagents and phosphoramidites of each of which are independently incorporated herein by reference. In some embodiments, a chiral auxiliary is

[chemical structure]

(DPSE chiral auxiliaries). In some embodiments, a chiral auxiliary is

[chemical structure]

In some embodiments, a chiral auxiliary is

[chemical structure]

In some embodiments, a chiral auxiliary comprises —SO₂R^{AU}, wherein R^{AU} is an optionally substituted group selected from C₁₋₂₀ aliphatic, C₁₋₂₀ heteroaliphatic having 1-10 heteroatoms, C₆₋₂₀ aryl, C₆₋₂₀ arylaliphatic, C₆₋₂₀ arylheteroaliphatic having 1-10 heteroatoms, 5-20 membered heteroaryl having 1-10 heteroatoms, and 3-20 membered heterocyclyl having 1-10 heteroatoms. In some embodiments, a chiral auxiliary is

[chemical structure]

In some embodiments, R^{AU} is optionally substituted aryl. In some embodiments, R^{AU} is optionally substituted phenyl. In some embodiments, R^{AU} is optionally substituted C₁₋₆ aliphatic. In some embodiments, a chiral auxiliary is

[chemical structure]

(PSM chiral auxiliaries). In some embodiments, utilization of such chiral auxiliaries, e.g., preparation, phosphoramidites comprising such chiral auxiliaries, intermediate oligonucleotides comprising such auxiliaries (which auxiliaries are typically bonded to linkage phosphorus through —O— of —OH, and —NH— are optionally capped, e.g., by —C(O)R), protection, removal, etc., is described in U.S. Pat. Nos. 9,394,333, 9,744,183, 9,605,019, 9,598,458, 9,982,257, U.S. Ser. No. 10/160,969, U.S. Ser. No. 10/479,995, US 2020/0056173, US 2018/0216107, US 2019/0127733, U.S. Ser. No. 10/450,568, US 2019/0077817, US 2019/0249173, US 2019/0375774, WO 2018/223056, WO 2018/223073, WO 2018/223081, WO 2018/237194, WO 2019/032607, WO 2019/055951, WO 2019/075357, WO 2019/200185, WO 2019/217784, WO 2019/032612, and/or WO 2020/191252 and incorporated herein by reference.

[0768] In some embodiments, chirally controlled preparation technologies, including oligonucleotide synthesis cycles, reagents and conditions are described in U.S. Pat. Nos. 9,394,333, 9,744,183, 9,605,019, 9,598,458, 9,982,257, U.S. Ser. No. 10/160,969, U.S. Ser. No. 10/479,995, US 2020/0056173, US 2018/0216107, US 2019/0127733, U.S. Ser. No. 10/450,568, US 2019/0077817, US 2019/0249173, US 2019/0375774, WO 2018/223056, WO 2018/223073, WO 2018/223081, WO 2018/237194, WO 2019/032607, WO 2019/055951, WO 2019/075357, WO 2019/200185, WO 2019/217784, WO 2019/032612, and/or WO 2020/191252, the oligonucleotide synthesis methods, cycles, reagents and conditions of each of which are independently incorporated herein by reference.

[0769] Once synthesized, ds oligonucleotides targeting HSD17B13 and compositions are typically further purified. Suitable purification technologies are widely known and practiced by those skilled in the art, including but not limited to those described in U.S. Pat. Nos. 9,394,333, 9,744,183, 9,605,019, 9,598,458, 9,982,257, U.S. Ser. No. 10/160,969, U.S. Ser. No. 10/479,995, US 2020/0056173, US 2018/0216107, US 2019/0127733, U.S. Ser. No. 10/450,568, US 2019/0077817, US 2019/0249173, US 2019/0375774, WO 2018/223056, WO 2018/223073, WO 2018/223081, WO 2018/237194, WO 2019/032607, WO 2019/055951, WO 2019/075357, WO 2019/200185, WO 2019/217784, WO 2019/032612, and/or WO 2020/191252, the purification technologies of each of which are independently incorporated herein by reference.

[0770] In some embodiments, a cycle comprises or consists of coupling, capping, modification and deblocking. In some embodiments, a cycle comprises or consists of coupling, capping, modification, capping and deblocking. These steps are typically performed in the order they are listed, but in some embodiments, as appreciated by those skilled in the art, the order of certain steps, e.g., capping and modification, may be altered. If desired, one or more steps may be repeated to improve conversion, yield and/or purity as those skilled in the art often perform in syntheses. For example, in some embodiments, coupling may be repeated; in some embodiments, modification (e.g., oxidation to install ═O, sulfurization to install ═S, etc.) may be repeated; in some embodiments, coupling is repeated after modification which can convert a P(III) linkage to a P(V) linkage which can be more stable under certain circumstances, and coupling is routinely followed by modification to convert newly formed P(III) linkages to P(V) linkages. In some embodiments, when steps are repeated, different conditions may be employed (e.g., concentration, temperature, reagent, time, etc.).

[0771] In some embodiments, oligonucleotides are linked to a solid support. In some embodiments, a solid support is a support for oligonucleotide synthesis. In some embodiments, a solid support comprises glass. In some embodiments, a solid support is CPG (controlled pore glass). In some embodiments, a solid support is polymer. In some embodiments, a solid support is polystyrene. In some embodiments, the solid support is Highly Crosslinked Polystyrene (HCP). In some embodiments, the solid support is hybrid support of Controlled Pore Glass (CPG) and Highly Cross-linked Polystyrene (HCP). In some embodiments, a solid support is a metal foam. In some embodiments, a solid support is a resin. In some embodiments, oligonucleotides are cleaved from a solid support.

[0772] Technologies for formulating provided oligonucleotides and/or preparing pharmaceutical compositions, e.g., for administration to subjects via various routes, are readily available in the art and can be utilized in accordance with the present disclosure, e.g., those described in U.S. Pat. Nos. 9,394,333, 9,744,183, 9,605,019, 9,598,458, 9,982,257, U.S. Ser. No. 10/160,969, U.S. Ser. No. 10/479,995, US 2020/0056173, US 2018/0216107, US 2019/0127733, U.S. Ser. No. 10/450,568, US 2019/0077817, US 2019/0249173, US 2019/0375774, WO 2018/223056, WO 2018/223073, WO 2018/223081, WO 2018/237194, WO 2019/032607, WO 2019/055951, WO 2019/075357, WO 2019/200185, WO 2019/217784, WO 2019/032612, and/or WO 2020/191252.

### Metabolites and Shortened Versions of Oligonucleotides

[0773] In some embodiments, a ds oligonucleotide targeting HSD17B13 corresponds to a metabolite produced by cleavage (e.g., enzymatic cleavage by a nuclease) of a longer oligonucleotide, e.g., a longer ds oligonucleotide targeting HSD17B13. In some embodiments, the present disclosure pertains to a ds oligonucleotide targeting HSD17B13 which corresponds to a portion, or fragment of a ds oligonucleotide targeting HSD17B13 disclosed herein.

[0774] In some embodiments, the present disclosure pertains to an oligonucleotide which corresponds to a metabolite of ads oligonucleotide targeting HSD17B13 disclosed herein. In some embodiments, the present disclosure pertains to an oligonucleotide which is 1, 2, 3, 4, 5, 6, 7, 8, 9, 10, 11, 12, 13, or more bases shorter than an oligonucleotide disclosed herein. In some embodiments, the present disclosure pertains to an oligonucleotide which has a base sequence which is 1, 2, 3, 4, 5, 6, 7, 8, 9, 10, 11, 12, 13, or more bases shorter than that of an oligonucleotide disclosed herein.

[0775] In some embodiments, a metabolite is designated as 3′-N— #, or 5′-N-#, wherein the # indicates the number of bases removed, and the 3′ or 5′ indicates which end of the molecule from which the bases were deleted. For example, 3′-N-1 indicates a fragment or metabolite wherein 1 base was removed from the 3′ end.

[0776] In some embodiments, the present disclosure perhaps to an oligonucleotide which corresponds to a fragment or metabolite of an oligonucleotide disclosed herein, wherein the fragment or metabolite can be described as corresponding to 3′-N-1, 3′-N-2, 3′-N-3, 3′-N-4, 3′-N-5, 3′-N-6, 3′-N-7, 3′-N-8, 3′-N-9, 3′-N-10, 3′-N-11, 3′-N-12, 5′-N-1, 5′-N-2, 5′-N-3, 5′-N4, 5′-N-5, 5′-N-6, 5′-N-7, 5′-N-8, 5′-N-9, 5′-N-10, 5′-N-11, or 5′-N-12 of an oligonucleotide described herein, wherein each T may be independently replaced with U and vice versa.

[0777] In some embodiments, the present disclosure pertains to an oligonucleotide which corresponds to a metabolite of an oligonucleotide, wherein the metabolite is truncated on the 5′ and/or 3′ end relative to the oligonucleotide disclosed herein, wherein each T may be independently replaced with U and vice versa. In some embodiments, the present disclosure pertains to an which corresponds to a metabolite of an oligonucleotide, wherein the metabolite is truncated on both the 5′ and 3′ end relative to the oligonucleotide disclosed herein, wherein each T may be independently replaced with U and vice versa. In some embodiments, the present disclosure pertains to an oligonucleotide which is 1, 2, 3, 4, 5, 6, 7, 8, 9, 10, 11, 12, 13, or more total bases shorter on the 5′ and/or 3′ end than an oligonucleotide disclosed herein. In some embodiments, the present disclosure pertains to an oligonucleotide which has a base sequence which is 1, 2, 3, 4, 5, 6, 7, 8, 9, 10, 11, 12, 13, or more bases total shorter on the 5′ and/or 3′ end than that of an oligonucleotide disclosed herein, wherein each T may be independently replaced with U and vice versa.

[0778] In some embodiments, the present disclosure pertains to an oligonucleotide which is a product of a cleavage of an oligonucleotide disclosed herein cleaved at a natural phosphate linkage. In some embodiments, the present disclosure pertains to an oligonucleotide which is a product of a cleavage of an oligonucleotide disclosed herein cleaved at a Rp phosphorothioate internucleotidic linkage.

[0779] Various technologies can be utilized to identify, characterize and/or assess metabolites and/or shortened ds oligonucleotides targeting HSD17B13 in accordance with the present disclosure, for example, those described in U.S. Ser. No. 10/479,995, US 2020/0056173, US 2018/0216107, US 2019/0127733, U.S. Ser. No. 10/450,568, US 2019/0249173, WO 2018/223056, WO 2018/223073, WO 2018/223081, WO 2019/032607, WO 2019/075357, WO 2019/200185, WO 2019/217784, WO 2019/032612, and/or WO 2020/191252.

### Characterization and Assessment

[0780] In some embodiments, properties and/or activities of ds oligonucleotides targeting HSD17B13 and compositions thereof can be characterized and/or assessed using various technologies available to those skilled in the art, e.g., biochemical assays (e.g., RNase H assays), cell based assays, animal models, clinical trials, etc.

[0781] In some embodiments, a method of identifying and/or characterizing an oligonucleotide composition, e.g., a ds oligonucleotide targeting HSD17B13 composition, comprises steps of:
[0782] providing at least one composition comprising a plurality of oligonucleotides; and
[0783] assessing delivery relative to a reference composition.

[0784] In some embodiments, the present disclosure provides a method of identifying and/or characterizing an oligonucleotide composition, e.g., a ds oligonucleotide targeting HSD17B13 composition, comprises steps of:
[0785] providing at least one composition comprising a plurality of oligonucleotides; and
[0786] assessing cellular uptake relative to a reference composition.

[0787] In some embodiments, the present disclosure provides a method of identifying and/or characterizing an oligonucleotide composition, e.g., a ds oligonucleotide targeting HSD17B13 composition, comprises steps of:
[0788] providing at least one composition comprising a plurality of oligonucleotides; and
[0789] assessing reduction of transcripts of a target gene and/or a product encoded thereby relative to a reference composition.

[0790] In some embodiments, the present disclosure provides a method of identifying and/or characterizing an oligonucleotide composition, e.g., a ds oligonucleotide targeting HSD17B13 composition, comprises steps of:
[0791] providing at least one composition comprising a plurality of oligonucleotides; and
[0792] assessing reduction of tau levels, its aggregation and/or spreading relative to a reference composition.

[0793] In some embodiments, properties and/or activities of oligonucleotides, e.g., ds oligonucleotides targeting HSD17B13, and compositions thereof are compared to reference oligonucleotides and compositions thereof, respectively.

[0794] In some embodiments, a reference oligonucleotide composition is a stereorandom oligonucleotide composition. In some embodiments, a reference oligonucleotide composition is a stereorandom composition of oligonucleotides of which all internucleotidic linkages are phosphorothioate. In some embodiments, a reference oligonucleotide composition is a DNA oligonucleotide composition with all phosphate linkages. In some embodiments, a reference oligonucleotide composition is otherwise identical to a provided chirally controlled oligonucleotide composition except that it is not chirally controlled. In some embodiments, a reference oligonucleotide composition is otherwise identical to a provided chirally controlled oligonucleotide composition except that it has a different pattern of stereochemistry. In some embodiments, a reference oligonucleotide composition is similar to a provided oligonucleotide composition except that it has a different modification of one or more sugar, base, and/or internucleotidic linkage, or pattern of modifications. In some embodiments, an oligonucleotide composition is stereorandom and a reference oligonucleotide composition is also stereorandom, but they differ in regards to sugar and/or base modification(s) or patterns thereof.

[0795] In some embodiments, a reference composition is a composition of oligonucleotides having the same base sequence and the same chemical modifications. In some embodiments, a reference composition is a composition of oligonucleotides having the same base sequence and the same pattern of chemical modifications. In some embodiments, a reference composition is a non-chirally controlled (or stereorandom) composition of oligonucleotides having the same base sequence and chemical modifications. In some embodiments, a reference composition is a non-chirally controlled (or stereorandom) composition of oligonucleotides of the same constitution but is otherwise identical to a provided chirally controlled oligonucleotide composition.

[0796] In some embodiments, a reference oligonucleotide composition is of oligonucleotides having a different base sequence. In some embodiments, a reference oligonucleotide composition is of oligonucleotides that do not target HSD17B13 (e.g., as negative control for certain assays).

[0797] In some embodiments, a reference composition is a composition of oligonucleotides having the same base sequence but different chemical modifications, including but not limited to chemical modifications described herein. In some embodiments, a reference composition is a composition of oligonucleotides having the same base sequence but different patterns of internucleotidic linkages and/or stereochemistry of internucleotidic linkages and/or chemical modifications.

[0798] Various methods are known in the art for detection of gene products, the expression, level and/or activity of which may be altered after introduction or administration of a provided oligonucleotide. For example, transcripts and their knockdown can be detected and quantified with qPCR, and protein levels can be determined via Western blot.

[0799] In some embodiments, assessment of efficacy of oligonucleotides can be performed in biochemical assays or in vitro in cells. In some embodiments, ds oligonucleotides targeting HSD17B13 can be introduced to cells via various methods available to those skilled in the art, e.g., gymnotic delivery, transfection, lipofection, etc.

[0800] In some embodiments, the efficacy of a putative ds oligonucleotide targeting HSD17B13 can be tested in vitro.

[0801] In some embodiments, the efficacy of a putative ds oligonucleotide targeting HSD17B13 can be tested in vitro using any known method of testing the expression, level and/or activity of a HSD17B13 gene or gene product thereof.

[0802] In some embodiments, an animal model administered a ds oligonucleotide targeting HSD17B13 can be evaluated for safety and/or efficacy.

[0803] In some embodiments, the effect(s) of administration of an oligonucleotide to an animal can be evaluated, including any effects on behavior, inflammation, and toxicity. In some embodiments, following dosing, animals can be observed for signs of toxicity including trouble grooming, lack of food consumption, and any other signs of lethargy.

[0804] In some embodiments, following administration of a ds oligonucleotide targeting HSD17B13 to an animal, the animal can be sacrificed and analysis of tissues or cells can be performed to determine changes in HSD17B13, or other biochemical or other changes. In some embodiments, following necropsy, liver, heart, lung, kidney, and spleen can be collected, fixed, and processed for histopathological evaluation (standard light microscopic examination of hematoxylin and eosin-stained tissue slides).

[0805] In some embodiments, following administration of a ds oligonucleotide targeting HSD17B13 to an animal, behavioral changes can be monitored or assessed. In some embodiments, such an assessment can be performed using a technique described in the scientific literature.

[0806] Various effects of testing in animals described herein can also be monitored in human subjects or patients following administration of a ds oligonucleotide targeting HSD17B13. In addition, the efficacy of a ds oligonucleotide targeting HSD17B13 in a human subject can be measured by evaluating, after administration of the oligonucleotide, any of various parameters known in the art, including but not limited to a reduction in a symptom of ****.

[0807] In some embodiments, following human treatment with an oligonucleotide, or contacting a cell or tissue in vitro with an oligonucleotide, cells and/or tissues are collected for analysis.

[0808] In some embodiments, in various cells and/or tissues, target nucleic acid levels can be quantitated by methods available in the art, many of which can be accomplished with commercially available kits and materials. Such methods include, e.g., Northern blot analysis, competitive polymerase chain reaction (PCR), quantitative real-time PCR, etc. RNA analysis can be performed on total cellular RNA or poly(A)+ mRNA. Probes and primers are designed to hybridize to a nucleic acid to be detected. Methods for designing real-time PCR probes and primers are well known and widely practiced in the art. For example, to detect and quantify HSD17B13 RNA, an example method comprises isolation of total RNA (e.g., including mRNA) from a cell or animal treated with an oligonucleotide or a composition and subjecting the RNA to reverse transcription and/or quantitative real-time PCR, for example, as described herein, or in: Moon et al. 2012 Cell Metab. 15: 240-246.

[0809] In some embodiments, protein levels can be evaluated or quantitated in various methods known in the art, e.g., enzyme-linked immunosorbent assay (ELISA), Western blot analysis (immunoblotting), immunocytochemistry, fluorescence-activated cell sorting (FACS), immunohistochemistry, immunoprecipitation, protein activity assays (for example, caspase activity assays), and quantitative protein assays. Antibodies useful for the detection of mouse, rat, monkey, and human proteins are commercially available or can be generated if needed. For example, various HSD17B13 antibodies have been reported.

[0810] Various technologies are available and/or known in the art for detecting levels of oligonucleotides or other nucleic acids. Such technologies are useful for detecting ds oligonucleotides targeting HSD17B13 when administered to assess, e.g., delivery, cell uptake, stability, distribution, etc.

[0811] In some embodiments, selection criteria are used to evaluate the data resulting from various assays and to select particularly desirable oligonucleotides, e.g., desirable ds oligonucleotides targeting HSD17B13, with certain properties and activities. In some embodiments, selection criteria include an IC₅₀ of less than about 10 nM, less than about 5 nM or less than about 1 nM. In some embodiments, selection criteria for a stability assay include at least 50% stability [at least 50% of an oligonucleotide is still remaining and/or detectable] at Day 1. In some embodiments, selection criteria for a stability assay include at least 50% stability at Day 2. In some embodiments, selection criteria for a stability assay include at least 50% stability at Day 3. In some embodiments, selection criteria for a stability assay include at least 50% stability at Day 4. In some embodiments, selection criteria for a stability assay include at least 50% stability at Day 5. In some embodiments, selection criteria for a stability assay include at least 80% [at least 80% of the oligonucleotide remains] at Day 5. In some embodiments, efficacy of a ds oligonucleotide targeting HSD17B13 is assessed directly or indirectly by monitoring, measuring or detecting a change in a condition, disorder, or disease or a biological pathway associated with HSD17B13.

[0812] In some embodiments, efficacy of a ds oligonucleotide targeting HSD17B13 is assessed directly or indirectly by monitoring, measuring or detecting a change in a response to be affected by HSD17B13 knockdown.

[0813] In some embodiments, a provided oligonucleotide (e.g., a ds oligonucleotide targeting HSD17B13) can by analyzed by a sequence analysis to determine what other genes [e.g., genes which are not a target gene (e.g., HSD17B13)] have a sequence which is complementary to the base sequence of the provided oligonucleotide (e.g., the ds oligonucleotide targeting HSD17B13) or which have 0, 1, 2 or more mismatches from the base sequence of the provided oligonucleotide (e.g., the ds oligonucleotide targeting HSD17B13). Knockdown, if any, by the oligonucleotide of these potential off-targets can be determined to evaluate potential off-target effects of an oligonucleotide (e.g., a ds oligonucleotide targeting HSD17B13). In some embodiments, an off-target effect is also termed an unintended effect and/or related to hybridization to a bystander (non-target) sequence or gene.

[0814] Oligonucleotides which have been evaluated and tested for efficacy in knocking down HSD17B13 have various uses, e.g., in treatment or prevention of a HSD17B13-associated condition, disorder, or disease or a symptom thereof.

[0815] In some embodiments, a ds oligonucleotide targeting HSD17B13 which has been evaluated and tested for its ability to provide a particular biological effect (e.g., reduction of level, expression and/or activity of a HSD17B13 target gene or a gene product thereof) can be used to treat, ameliorate and/or prevent a HSD17B13-associated condition, disorder, or disease.

### Treatment of HSD17B13-Associated Conditions, Disorders, or Diseases

[0816] In some embodiments, the present disclosure provides a ds oligonucleotide targeting HSD17B13, which targets HSD17B13 and directs target-specific knockdown of HSD17B13. In some embodiments, the present disclosure provides methods for preventing and/or treating HSD17B13-associated conditions, disorders, or diseases using provided ds oligonucleotides targeting HSD17B13 and compositions thereof. In some embodiments, the present disclosure provides oligonucleotides and compositions thereof for use as medicaments, e.g., for HSD17B13-associated conditions, disorders, or diseases. In some embodiments, the present disclosure provides oligonucleotides and compositions thereof for use in the treatment of HSD17B13-associated conditions, disorders, or diseases. In some embodiments, the present disclosure provides oligonucleotides and compositions thereof for the manufacture of medicaments for the treatment of HSD17B13-associated conditions, disorders, or diseases.

[0817] In some embodiments, the present disclosure provides a method for treating and/or ameliorating one or more symptoms associated with a HSD17B13-associated condition, disorder, or disease in a mammal in need thereof, the method comprising administering to the mammal a therapeutically effective amount of a ds oligonucleotide targeting HSD17B13 or a composition thereof. In some embodiments, the present disclosure provides a method for reducing susceptibility to a HSD17B13-associated condition, disorder, or disease in a mammal in need thereof, the method comprising: administering to the mammal a therapeutically effective amount of a ds oligonucleotide targeting HSD17B13 or a composition thereof. In some embodiments, the present disclosure provides a method for preventing or delaying the onset of a HSD17B13-associated condition, disorder, or disease in a mammal in need thereof, the method comprising: administering to the mammal a therapeutically effective amount of a ds oligonucleotide targeting HSD17B13 or a composition thereof. In some embodiments, the present disclosure provides a method for treating and/or ameliorating one or more symptoms associated with a HSD17B13-associated condition, disorder, or disease in a mammal in need thereof, the method comprising: administering to the mammal a therapeutically effective amount of a nucleic acid-lipid particle comprising a ds oligonucleotide targeting HSD17B13. In some embodiments, the present disclosure provides a method for reducing susceptibility to a HSD17B13-associated condition, disorder, or disease in a mammal in need thereof, the method comprising: administering to the mammal a therapeutically effective amount of a nucleic acid-lipid particle comprising a ds oligonucleotide targeting HSD17B13. In some embodiments, the present disclosure provides a method for preventing or delaying the onset of a HSD17B13-associated condition, disorder, or disease in a mammal in need thereof, the method comprising: administering to the mammal a therapeutically effective amount of a nucleic acid-lipid particle comprising a ds oligonucleotide targeting HSD17B13. In some embodiments, a mammal is a human. In some embodiments, a mammal is susceptible to, afflicted with and/or suffering from a HSD17B13-associated condition, disorder, or disease. In some embodiments, a HSD17B13-associated condition, disorder, or disease is NAFLD, NASH, ASH, alcoholic liver disease, nonalcoholic liver disease, alcoholic cirrhosis, nonalcoholic cirrhosis, steatohepatitis, hepatic steatosis, hepatoceullar carcinoma, HCV hepatitis, chronic hepatitis, hereditary hemochromatosis, primary sclerosing cholangitis, drug induced liver injury, or hepatocellular necrosis.

[0818] In some embodiments, provided oligonucleotides and compositions are useful for preventing and/or treating neurodegenerative diseases, e.g., NAFLD, NASH, ASH, alcoholic liver disease, nonalcoholic liver disease, alcoholic cirrhosis, nonalcoholic cirrhosis, steatohepatitis, hepatic steatosis, hepatoceullar carcinoma, HCV hepatitis, chronic hepatitis, hereditary hemochromatosis, primary sclerosing cholangitis, drug induced liver injury, or hepatocellular necrosis, etc. In some embodiments, the present disclosure provides methods for preventing and/or treating a neurodegenerative disease, e.g., NAFLD, NASH, ASH, alcoholic liver disease, nonalcoholic liver disease, alcoholic cirrhosis, nonalcoholic cirrhosis, steatohepatitis, hepatic steatosis, hepatoceullar carcinoma, HCV hepatitis, chronic hepatitis, hereditary hemochromatosis, primary sclerosing cholangitis, drug induced liver injury, or hepatocellular necrosis, etc., comprising administering to a subject susceptible to or suffering therefrom a therapeutically effective amount of a ds oligonucleotide targeting HSD17B13 or a composition as described herein. In some embodiments, the present disclosure provides methods for treating a neurodegenerative disease comprising administering to a subject suffering therefrom a therapeutically effective amount of a ds oligonucleotide targeting HSD17B13 or a composition as described herein. In some embodiments, the present disclosure provides methods for preventing and/or treating a tauopathy comprising administering to a subject susceptible to or suffering therefrom a therapeutically effective amount of a ds oligonucleotide targeting HSD17B13 or a composition as described herein. In some embodiments, the present disclosure provides methods for treating a tauopathy comprising administering to a subject suffering therefrom a therapeutically effective amount of a ds oligonucleotide targeting HSD17B13 or a composition as described herein. In some embodiments, the present disclosure provides methods for preventing and/or treating NAFLD, NASH, ASH, alcoholic liver disease, nonalcoholic liver disease, alcoholic cirrhosis, nonalcoholic cirrhosis, steatohepatitis, hepatic steatosis, hepatoceullar carcinoma, HCV hepatitis, chronic hepatitis, hereditary hemochromatosis, primary sclerosing cholangitis, drug induced liver injury, or hepatocellular necrosis comprising administering to a subject susceptible to or suffering therefrom a therapeutically effective amount of a ds oligonucleotide targeting HSD17B13 or a composition as described herein. In some embodiments, the present disclosure provides methods for treating NAFLD, NASH, ASH, alcoholic liver disease, nonalcoholic liver disease, alcoholic cirrhosis, nonalcoholic cirrhosis, steatohepatitis, hepatic steatosis, hepatoceullar carcinoma, HCV hepatitis, chronic hepatitis, hereditary hemochromatosis, primary sclerosing cholangitis, drug induced liver injury, or hepatocellular necrosis comprising administering to a subject suffering therefrom a therapeutically effective amount of ads oligonucleotide targeting HSD17B13 or a composition as described herein. In some embodiments, a subject has increased HSD17B13 expression, and/or increased levels of one or more HSD17B13 products (e.g., transcripts, proteins, etc.) compared to, e.g., a health subject (or a population thereof), a subject that is not susceptible to and/or not suffering from an HSD17B13-associated disease (or a population thereof), etc.

[0819] In some embodiments, provided oligonucleotides and compositions may be optionally utilized in combination with one or more other therapeutic agents.

### Administration of Oligonucleotides and Compositions

[0820] Many delivery methods, regimen, etc. can be utilized in accordance with the present disclosure for administering provided ds oligonucleotides and compositions thereof (typically pharmaceutical compositions for therapeutic purposes), including various technologies known in the art.

[0821] In some embodiments, an oligonucleotide composition, e.g., a ds oligonucleotide targeting HSD17B13 composition, is administered at a dose and/or frequency lower than that of an otherwise comparable reference oligonucleotide composition and has comparable or improved effects. In some embodiments, a chirally controlled oligonucleotide composition is administered at a dose and/or frequency lower than that of a comparable, otherwise identical stereorandom reference oligonucleotide composition and with comparable or improved effects, e.g., in improving the knockdown of the target transcript.

[0822] In some embodiments, the present disclosure recognizes that properties and activities, e.g., knockdown activity, stability, toxicity, etc. of oligonucleotides and compositions thereof can be modulated and optimized by chemical modifications and/or stereochemistry. In some embodiments, the present disclosure provides methods for optimizing oligonucleotide properties and/or activities through chemical modifications and/or stereochemistry. In some embodiments, the present disclosure provides oligonucleotides and compositions thereof with improved properties and/or activities. Without wishing to be bound by any theory, due to, e.g., their better activity, stability, delivery, distribution, toxicity, pharmacokinetic, pharmacodynamics and/or efficacy profiles, Applicant notes that provided oligonucleotides and compositions thereof in some embodiments can be administered at lower dosage and/or reduced frequency to achieve comparable or better efficacy, and in some embodiments can be administered at higher dosage and/or increased frequency to provide enhanced effects.

[0823] In some embodiments, the present disclosure provides, in a method of administering an oligonucleotide composition comprising a plurality of oligonucleotides sharing a common base sequence, the improvement comprising administering an oligonucleotide comprising a plurality of oligonucleotides that is characterized by improved delivery relative to a reference oligonucleotide composition of the same common base sequence.

[0824] In some embodiments, provided oligonucleotides, compositions and methods provide improved delivery. In some embodiments, provided oligonucleotides, compositions and methods provide improved cytoplasmatic delivery. In some embodiments, improved delivery is to a population of cells. In some embodiments, improved delivery is to a tissue. In some embodiments, improved delivery is to an organ. In some embodiments, improved delivery is to an organism, e.g., a patient or subject. Example structural elements (e.g., chemical modifications, stereochemistry, combinations thereof, etc.), oligonucleotides, compositions and methods that provide improved delivery are extensively described in the present disclosure.

[0825] Various dosing regimens can be utilized to administer oligonucleotides and compositions of the present disclosure. In some embodiments, multiple unit doses are administered, separated by periods of time. In some embodiments, a given composition has a recommended dosing regimen, which may involve one or more doses. In some embodiments, a dosing regimen comprises a plurality of doses each of which are separated from one another by a time period of the same length; in some embodiments, a dosing regimen comprises a plurality of doses and at least two different time periods separating individual doses. In some embodiments, all doses within a dosing regimen are of the same unit dose amount. In some embodiments, different doses within a dosing regimen are of different amounts. In some embodiments, a dosing regimen comprises a first dose in a first dose amount, followed by one or more additional doses in a second dose amount different from the first dose amount. In some embodiments, a dosing regimen comprises a first dose in a first dose amount, followed by one or more additional doses in a second (or subsequent) dose amount that is the same as or different from the first dose (or another prior dose) amount. In some embodiments, a chirally controlled oligonucleotide composition is administered according to a dosing regimen that differs from that utilized for a non-chirally controlled (e.g., stereorandom) oligonucleotide composition of the same sequence, and/or of a different chirally controlled oligonucleotide composition of the same sequence. In some embodiments, a chirally controlled oligonucleotide composition is administered according to a dosing regimen that is reduced as compared with that of a chirally uncontrolled (e.g., stereorandom) oligonucleotide composition of the same sequence in that it achieves a lower level of total exposure over a given unit of time, involves one or more lower unit doses, and/or includes a smaller number of doses over a given unit of time. In some embodiments, a chirally uncontrolled oligonucleotide is administered according to a dosing regimen that extends for a longer period of time than does that of a chirally uncontrolled (e.g., stereorandom) oligonucleotide composition of the same sequence Without wishing to be limited by theory, Applicant notes that in some embodiments, the shorter dosing regimen, and/or longer time periods between doses, may be due to the improved stability, bioavailability, and/or efficacy of a chirally controlled oligonucleotide composition. In some embodiments, with their improved delivery (and other properties), provided compositions can be administered in lower dosages and/or with lower frequency to achieve biological effects, for example, clinical efficacy.

### Pharmaceutical Compositions

[0826] When used as therapeutics, a provided ds oligonucleotide, e.g., a ds oligonucleotide targeting HSD17B13, or oligonucleotide composition thereof is typically administered as a pharmaceutical composition. In some embodiments, the present disclosure provides pharmaceutical compositions comprising a provided compound, e.g., an oligonucleotide, or a pharmaceutically acceptable salt thereof, and a pharmaceutical carrier. In some embodiments, for therapeutic and clinical purposes, oligonucleotides of the present disclosure are provided as pharmaceutical compositions. As appreciated by those skilled in the art, oligonucleotides of the present disclosure can be provided in their acid, base or salt forms. In some embodiments, oligonucleotides can be in acid forms, e.g., for natural phosphate linkages, in the form of —OP(O)(OH)O—; for phosphorothioate internucleotidic linkages, in the form of —OP(O)(SH)O—; etc. In some embodiments, ds oligonucleotides targeting HSD17B13 can be in salt forms, e.g., for natural phosphate linkages, in the form of —OP(O)(ONa)O— in sodium salts; for phosphorothioate internucleotidic linkages, in the form of —OP(O)(SNa)O— in sodium salts; etc. Unless otherwise noted, oligonucleotides of the present disclosure can exist in acid, base and/or salt forms.

[0827] In some embodiments, a pharmaceutical composition is a liquid composition. In some embodiments, a pharmaceutical composition is provided by dissolving a solid oligonucleotide composition, or diluting a concentrated oligonucleotide composition, using a suitable solvent, e.g., water or a pharmaceutically acceptable buffer. In some embodiments, liquid compositions comprise anionic forms of provided oligonucleotides and one or more cations. In some embodiments, liquid compositions have pH values in the weak acidic, about neutral, or basic range. In some embodiments, pH of a liquid composition is about a physiological pH, e.g., about 7.4.

[0828] In some embodiments, a provided oligonucleotide is formulated for administration to and/or contact with a body cell and/or tissue expressing its target. For example, in some embodiments, a provided ds oligonucleotide targeting HSD17B13 is formulated for administration to a body cell and/or tissue expressing HSD17B13. In some embodiments, such a body cell and/or tissue are a neuron or a cell and/or tissue of the central nervous system. In some embodiments, broad distribution of oligonucleotides and compositions may be achieved with intraparenchymal administration, intrathecal administration, or intracerebroventricular administration.

[0829] In some embodiments, the pharmaceutical composition is formulated for intravenous injection, oral administration, buccal administration, inhalation, nasal administration, topical administration, ophthalmic administration or otic administration. In some embodiments, the pharmaceutical composition is a tablet, a pill, a capsule, a liquid, an inhalant, a nasal spray solution, a suppository, a suspension, a gel, a colloid, a dispersion, a suspension, a solution, an emulsion, an ointment, a lotion, an eye drop or an ear drop.

[0830] In some embodiments, the present disclosure provides a pharmaceutical composition comprising chirally controlled oligonucleotide or composition thereof, in admixture with a pharmaceutically acceptable inactive ingredient (e.g., a pharmaceutically acceptable excipient, a pharmaceutically acceptable carrier, etc.). In some embodiments, the present disclosure provides a pharmaceutical composition delivering chirally controlled oligonucleotide or composition thereof, in admixture with a pharmaceutically acceptable inactive ingredient (e.g., a pharmaceutically acceptable excipient, a pharmaceutically acceptable carrier, etc.). One of skill in the art will recognize that the pharmaceutical compositions include pharmaceutically acceptable salts of provided oligonucleotide or compositions. In some embodiments, a pharmaceutical composition is a chirally controlled oligonucleotide composition. In some embodiments, a pharmaceutical composition is a stereopure oligonucleotide composition.

[0831] In some embodiments, the present disclosure provides salts of oligonucleotides and pharmaceutical compositions thereof. In some embodiments, a salt is a pharmaceutically acceptable salt. In some embodiments, a pharmaceutical composition comprises an oligonucleotide, optionally in its salt form, and a sodium salt. In some embodiments, a pharmaceutical composition comprises an oligonucleotide, optionally in its salt form, and sodium chloride. In some embodiments, each hydrogen ion of an oligonucleotide that may be donated to a base (e.g., under conditions of an aqueous solution, a pharmaceutical composition, etc.) is replaced by a non-H⁺ cation. For example, in some embodiments, a pharmaceutically acceptable salt of an oligonucleotide is an all-metal ion salt, wherein each hydrogen ion (for example, of —OH, —SH, etc.) of each internucleotidic linkage (e.g., a natural phosphate linkage, a phosphorothioate internucleotidic linkage, etc.) is replaced by a metal ion. Various suitable metal salts for pharmaceutical compositions are widely known in the art and can be utilized in accordance with the present disclosure. In some embodiments, a pharmaceutically acceptable salt is a sodium salt. In some embodiments, a pharmaceutically acceptable salt is magnesium salt. In some embodiments, a pharmaceutically acceptable salt is a calcium salt. In some embodiments, a pharmaceutically acceptable salt is a potassium salt. In some embodiments, a pharmaceutically acceptable salt is an ammonium salt (cation N(R)₄⁺). In some embodiments, a pharmaceutically acceptable salt comprises one and no more than one types of cation. In some embodiments, a pharmaceutically acceptable salt comprises two or more types of cation. In some embodiments, a cation is Li⁺, Na⁺, K⁺, Mg²⁺ or Ca²⁺. In some embodiments, a pharmaceutically acceptable salt is an all-sodium salt. In some embodiments, a pharmaceutically acceptable salt is an all-sodium salt, wherein each internucleotidic linkage which is a natural phosphate linkage (acid form —O—P(O)(OH)—O—), if any, exists as its sodium salt form (—O—P(O)(ONa)—O—), and each internucleotidic linkage which is a phosphorothioate internucleotidic linkage (acid form —O—P(O)(SH)—O—), if any, exists as its sodium salt form (—O—P(O)(SNa)—O—).

[0832] Various technologies for delivering nucleic acids and/or oligonucleotides are known in the art can be utilized in accordance with the present disclosure. For example, a variety of supramolecular nanocarriers can be used to deliver nucleic acids. Example nanocarriers include, but are not limited to liposomes, cationic polymer complexes and various polymeric compounds. Complexation of nucleic acids with various polycations is another approach for intracellular delivery; this includes use of PEGylated polycations, polyethyleneamine (PEI) complexes, cationic block co-polymers, and dendrimers. Several cationic nanocarriers, including PEI and polyamidoamine dendrimers help to release contents from endosomes. Other approaches include use of polymeric nanoparticles, microspheres, liposomes, dendrimers, biodegradable polymers, conjugates, prodrugs, inorganic colloids such as sulfur or iron, antibodies, implants, biodegradable implants, biodegradable microspheres, osmotically controlled implants, lipid nanoparticles, emulsions, oily solutions, aqueous solutions, biodegradable polymers, poly(lactide-coglycolic acid), poly(lactic acid), liquid depot, polymer micelles, quantum dots and lipoplexes. In some embodiments, an oligonucleotide is conjugated to another molecule.

[0833] In therapeutic and/or diagnostic applications, compounds, e.g., oligonucleotides, of the disclosure can be formulated for a variety of modes of administration, including systemic and topical or localized administration. Techniques and formulations generally may be found in Remington, The Science and Practice of Pharmacy (20th ed. 2000).

[0834] Pharmaceutically acceptable salts for basic moieties are generally well known to those of ordinary skill in the art, and may include, e.g., acetate, benzenesulfonate, besylate, benzoate, bicarbonate, bitartrate, bromide, calcium edetate, carnsylate, carbonate, citrate, edetate, edisylate, estolate, esylate, fumarate, gluceptate, gluconate, glutamate, glycollylarsanilate, hexylresorcinate, hydrabamine, hydrobromide, hydrochloride, hydroxynaphthoate, iodide, isethionate, lactate, lactobionate, malate, maleate, mandelate, mesylate, mucate, napsylate, nitrate, pamoate (embonate), pantothenate, phosphate/diphosphate, polygalacturonate, salicylate, stearate, subacetate, succinate, sulfate, tannate, tartrate, or teoclate. Other pharmaceutically acceptable salts may be found in, for example, Remington, The Science and Practice of Pharmacy (20th ed. 2000). Preferred pharmaceutically acceptable salts include, for example, acetate, benzoate, bromide, carbonate, citrate, gluconate, hydrobromide, hydrochloride, maleate, mesylate, napsylate, pamoate (embonate), phosphate, salicylate, succinate, sulfate, or tartrate.

[0835] In some embodiments, ds oligonucleotides targeting HSD17B13 are formulated in pharmaceutical compositions described in WO 2005/060697, WO 2011/076807 or WO 2014/136086.

[0836] Depending on the specific conditions, disorders, or diseases being treated, provided agents, e.g., oligonucleotides, may be formulated into liquid or solid dosage forms and administered systemically or locally. Provided oligonucleotides may be delivered, for example, in a timed- or sustained-low release form as is known to those skilled in the art. Techniques for formulation and administration may be found in Remington, The Science and Practice of Pharmacy (20th ed. 2000). Suitable routes may include oral, buccal, by inhalation spray, sublingual, rectal, transdermal, vaginal, transmucosal, nasal or intestinal administration; parenteral delivery, including intramuscular, subcutaneous, intramedullary injections, as well as intrathecal, direct intraventricular, intravenous, intra-articular, intra-sternal, intra-synovial, intra-hepatic, intralesional, intracranial, intraperitoneal, intranasal, or intraocular injections or another mode of delivery.

[0837] For injection, provided agents, e.g., oligonucleotides may be formulated and diluted in aqueous solutions, such as in physiologically compatible buffers such as Hank's solution, Ringer's solution, or physiological saline buffer. For such transmucosal administration, penetrants appropriate to the barrier to be permeated are used in the formulations. Such penetrants are generally known in the art and can be utilized in accordance with the present disclosure.

[0838] Use of pharmaceutically acceptable carriers to formulate compounds, e.g., provided oligonucleotides, for the practice of the disclosure into dosages suitable for various mods of administration is well known in the art. With proper choice of carrier and suitable manufacturing practice, compositions of the present disclosure, e.g., those formulated as solutions, may be administered via various routes, e.g., parenterally, such as by intravenous injection.

[0839] In some embodiments, a composition comprising a ds oligonucleotide targeting HSD17B13 further comprises any or all of: calcium chloride dihydrate, magnesium chloride hexahydrate, potassium chloride, sodium chloride, sodium phosphate dibasic anhydrous, sodium phosphate, monobasic dihydrate, and/or water for Injection. In some embodiments, a composition further comprises any or all of: calcium chloride dihydrate (0.21 mg) USP, magnesium chloride hexahydrate (0.16 mg) USP, potassium chloride (0.22 mg) USP, sodium chloride (8.77 mg) USP, sodium phosphate dibasic anhydrous (0.10 mg) USP, sodium phosphate monobasic dihydrate (0.05 m g) USP, and Water for Injection USP.

[0840] In some embodiments, a composition comprising an oligonucleotide further comprises any or all of: cholesterol, (6Z,9Z,28Z,31Z)-heptatriaconta-6,9,28,31-tetraen-19-yl-4-(dimethylamino) butanoate(DLin-MC3-DMA), 1,2-distearoyl-sn-glycero-3-phosphocholine (DSPC), alpha-(3′-{[1,2-di(myristyloxy)propanoxy] carbonylamino}propyl)-omega-methoxy, polyoxyethylene(PEG2000-C-DMG), potassium phosphate monobasic anhydrous NF, sodium chloride, sodium phosphate dibasic heptahydrate, and Water for Injection. In some embodiments, the pH of a composition comprising a ds oligonucleotide targeting HSD17B13 is -7.0. In some embodiments, a composition comprising an oligonucleotide further comprises any or all of: 6.2 mg cholesterol USP, 13.0 mg (6Z,9Z,28Z,31Z)-heptatriaconta-6,9,28,31-tetraen-19-yl-4-(dimethylamino) butanoate(DLin-MC3-DMA), 3.3 mg 1,2-distearoyl-sn-glycero-3-phosphocholine (DSPC), 1.6 mg α-(3′-{[1,2-di(myristyloxy)propanoxy]carbonylamino}propyl)-ω-methoxy, polyoxyethylene(PEG2000-C-DMG), 0.2 mg potassium phosphate monobasic anhydrous NF, 8.8 mg sodium chloride USP, 2.3 mg sodium phosphate dibasic heptahydrate USP, and Water for Injection USP, in an approximately 1 mL total volume.

[0841] Provided compounds, e.g., oligonucleotides, can be formulated readily using pharmaceutically acceptable carriers well known in the art into dosages suitable for oral administration. In some embodiments, such carriers enable provided oligonucleotides to be formulated as tablets, pills, capsules, liquids, gels, syrups, slurries, suspensions and the like, for, e.g., oral ingestion by a subject (e.g., patient) to be treated.

[0842] For nasal or inhalation delivery, provided compounds, e.g., oligonucleotides, may be formulated by methods known to those of skill in the art, and may include, e.g., examples of solubilizing, diluting, or dispersing substances such as saline, preservatives, such as benzyl alcohol, absorption promoters, and fluorocarbons.

[0843] In certain embodiments, parenteral administration is by injection, by, e.g., a syringe, a pump, etc. In certain embodiments, an injection is a bolus injection. In certain embodiments, an injection is administered directly to a tissue or location, such as striatum, caudate, cortex, hippocampus and/or cerebellum.

[0844] In certain embodiments, methods of specifically localizing provided compounds, e.g., oligonucleotides, such as by bolus injection, may decrease median effective concentration (EC50) by a factor of 20, 25, 30, 35, 40, 45 or 50. In certain embodiments, a targeted tissue is brain tissue. In certain embodiments, a targeted tissue is striatal tissue. In certain embodiments, decreasing EC50 is desirable because it reduces the dose required to achieve a pharmacological result in a patient in need thereof.

[0845] In certain embodiments, a provided oligonucleotide is delivered by injection or infusion once every month, every two months, every 90 days, every 3 months, every 6 months, twice a year or once a year.

[0846] Pharmaceutical compositions suitable for use in the present disclosure include compositions wherein the active ingredients, e.g., oligonucleotides, are contained in effective amounts to achieve their intended purposes. Determination of the effective amounts is well within the capability of those skilled in the art, especially in light of the detailed disclosure provided herein.

[0847] In addition to active ingredients, pharmaceutical compositions may contain suitable pharmaceutically acceptable carriers comprising excipients and auxiliaries which facilitate processing of an active compound into preparations which can be used pharmaceutically. Preparations formulated for oral administration may be in the form of tablets, dragees, capsules, or solutions.

[0848] In some embodiments, pharmaceutical compositions for oral use can be obtained by combining an active compound with solid excipients, optionally grinding a resulting mixture, and processing the mixture of granules, after adding suitable auxiliaries, if desired, to obtain tablets or dragee cores. Suitable excipients are, in particular, fillers such as sugars, including lactose, sucrose, mannitol, or sorbitol; cellulose preparations, for example, maize starch, wheat starch, rice starch, potato starch, gelatin, gum tragacanth, methyl cellulose, hydroxypropylmethyl-cellulose, sodium carboxymethyl-cellulose (CMC), and/or polyvinylpyrrolidone (PVP: povidone). If desired, disintegrating agents may be added, such as the cross-linked polyvinylpyrrolidone, agar, or alginic acid or a salt thereof such as sodium alginate.

[0849] In some embodiments, dragee cores are provided with suitable coatings. For this purpose, concentrated sugar solutions may be used, which may optionally contain gum arabic, talc, polyvinylpyrrolidone, carbopol gel, polyethylene glycol (PEG), and/or titanium dioxide, lacquer solutions, and suitable organic solvents or solvent mixtures. Dye-stuffs or pigments may be added to the tablets or dragee coatings for identification or to characterize different combinations of active compound doses.

[0850] Pharmaceutical preparations that can be used orally include push-fit capsules made of gelatin, as well as soft, sealed capsules made of gelatin, and a plasticizer, such as glycerol or sorbitol. Push-fit capsules can contain active ingredients, e.g., oligonucleotides, in admixture with fillers such as lactose, binders such as starches, and/or lubricants such as talc or magnesium stearate and, optionally, stabilizers. In soft capsules, active compounds, e.g., oligonucleotides, may be dissolved or suspended in suitable liquids, such as fatty oils, liquid paraffin, or liquid polyethylene glycols (PEGs). In addition, stabilizers may be added.

[0851] In some embodiments, a provided composition comprises a lipid. In some embodiments, a lipid is conjugated to an active compound, e.g., an oligonucleotide. In some embodiments, a lipid is not conjugated to an active compound. In some embodiments, a lipid comprises a C₁₀-C₄₀ linear, saturated or partially unsaturated, aliphatic chain. In some embodiments, a lipid comprises a C₁₀-C₄₀ linear, saturated or partially unsaturated, aliphatic chain, optionally substituted with one or more C₁₋₄ aliphatic group. In some embodiments, the lipid is selected from the group consisting of lauric acid, myristic acid, palmitic acid, stearic acid, oleic acid, linoleic acid, alpha-linolenic acid, gamma-linolenic acid, docosahexaenoic acid (cis-DHA), turbinaric acid and dilinoleyl alcohol. In some embodiments, an active compound is a provided oligonucleotide. In some embodiments, a composition comprises a lipid and an active compound, and further comprises another component which is another lipid or a targeting compound or moiety. In some embodiments, a lipid is an amino lipid; an amphipathic lipid; an anionic lipid; an apolipoprotein; a cationic lipid; a low molecular weight cationic lipid; a cationic lipid such as CLinDMA and DLinDMA; an ionizable cationic lipid; a cloaking component; a helper lipid; a lipopeptide; a neutral lipid; a neutral zwitterionic lipid; a hydrophobic small molecule; a hydrophobic vitamin; a PEG-lipid; an uncharged lipid modified with one or more hydrophilic polymers; phospholipid; a phospholipid such as 1,2-dioleoyl-sn-glycero-3-phosphoethanolamine; a stealth lipid; a sterol; a cholesterol; a targeting lipid; or another lipid described herein or reported in the art suitable for pharmaceutical uses. In some embodiments, a composition comprises a lipid and a portion of another lipid capable of mediating at least one function of another lipid. In some embodiments, a targeting compound or moiety is capable of targeting a compound (e.g., an oligonucleotide) to a particular cell or tissue or subset of cells or tissues. In some embodiments, a targeting moiety is designed to take advantage of cell- or tissue-specific expression of particular targets, receptors, proteins, or another subcellular component. In some embodiments, a targeting moiety is a ligand (e.g., a small molecule, antibody, peptide, protein, carbohydrate, aptamer, etc.) that targets a composition to a cell or tissue, and/or binds to a target, receptor, protein, or another subcellular component.

[0852] Certain example lipids for delivery of an active compound, e.g., an oligonucleotide, allow (e.g., do not prevent or interfere with) the function of an active compound. In some embodiments, a lipid is lauric acid, myristic acid, palmitic acid, stearic acid, oleic acid, linoleic acid, alpha-linolenic acid, gamma-linolenic acid, docosahexaenoic acid (cis-DHA), turbinaric acid or dilinoleyl alcohol.

[0853] As described in the present disclosure, lipid conjugation, such as conjugation with fatty acids, may improve one or more properties of oligonucleotides.

[0854] In some embodiments, a composition for delivery of an active compound, e.g., an oligonucleotide, is capable of targeting an active compound to particular cells or tissues as desired. In some embodiments, a composition for delivery of an active compound is capable of targeting an active compound to a muscle cell or tissue. In some embodiments, the present disclosure provides compositions and methods related to delivery of active compounds, wherein the compositions comprise an active compound and a lipid. In various embodiments to a muscle cell or tissue, a lipid is selected from lauric acid, myristic acid, palmitic acid, stearic acid, oleic acid, linoleic acid, alpha-linolenic acid, gamma-linolenic acid, docosahexaenoic acid (cis-DHA), turbinaric acid and dilinoleyl alcohol.

[0855] In some embodiments, a ds oligonucleotide targeting HSD17B13 is delivered via a composition comprising any one or more of, or a method of delivery involving the use of any one or more of: transferrin receptor-targeted nanoparticle; cationic liposome-based delivery strategy; cationic liposome; polymeric nanoparticle; viral carrier; retrovirus; adeno-associated virus; stable nucleic acid lipid particle; polymer; cell-penetrating peptide; lipid; dendrimer; neutral lipid; cholesterol; lipid-like molecule; fusogenic lipid; hydrophilic molecule; polyethylene glycol (PEG) or a derivative thereof; shielding lipid; PEGylated lipid; PEG-C-DMSO; PEG-C-DMSA; DSPC; ionizable lipid; a guanidinium-based cholesterol derivative; ion-coated nanoparticle; metal-ion coated nanoparticle; manganese ion-coated nanoparticle; angubindin-1; nanogel; incorporation of the HSD17B13 targeting ds oligonucleotide into a branched nucleic acid structure; and/or incorporation of the HSD17B13 targeting ds oligonucleotide into a branched nucleic acid structure comprising 2, 3, 4 or more oligonucleotides.

[0856] In some embodiments, a composition comprising an oligonucleotide is lyophilized. In some embodiments, a composition comprising an oligonucleotide is lyophilized, and the lyophilized oligonucleotide is in a vial. In some embodiments, the vial is back filled with nitrogen. In some embodiments, the lyophilized oligonucleotide composition is reconstituted prior to administration. In some embodiments, the lyophilized oligonucleotide composition is reconstituted with a sodium chloride solution prior to administration. In some embodiments, the lyophilized oligonucleotide composition is reconstituted with a 0.9% sodium chloride solution prior to administration. In some embodiments, reconstitution occurs at the clinical site for administration. In some embodiments, in a lyophilized composition, an oligonucleotide composition is chirally controlled or comprises at least one chirally controlled internucleotidic linkage and/or the ds oligonucleotide targets HSD17B13.

### Transgenic HSD17B13 Non-Human Animals

[0857] In some embodiments, the present disclosure provides engineered animals and cell thereof, wherein the animals are engineered to comprise or express an HSD17B13 polypeptide or a characteristic portion thereof, and/or a polynucleotide encoding such an HSD17B13 polypeptide or a characteristic portion thereof. In some embodiments, an HSD17B13 polypeptide or a characteristic portion thereof is or comprises a sequence that shares about 80-100%, e.g., about or at least about 80%, 81%, 82%, 83%, 84%, 85%, 86%, 87%, 88%, 89%, 90%, 91%, 92%, 93%, 94%, 95%, 96%, 97%, 98%, 99%, 100% identity with a primate, e.g., a human HSD17B13 or a characteristic portion thereof. In some embodiments, an HSD17B13 polypeptide or a characteristic portion thereof is or comprises a sequence that shares about 80-100%, e.g., about or at least about 80%, 81%, 82%, 83%, 84%, 85%, 86%, 87%, 88%, 89%, 90%, 91%, 92%, 93%, 94%, 95%, 96%, 97%, 98%, 99%, 100% identity with one or more domains of human HSD17B13 (e.g., an HSD17B13 lipid droplet targeting domain (comprising an N-terminal hydrophobic domain, PAT-like domain, and a putative a-helix/p-sheet/a-helix domain) and HSD17B13 enzymatic activity domains (comprising catalytic sites, substrate binding sites, and homodimer interaction sites).

### Exemplary HSD17B13 Sequence Embodiments

[0858] In certain embodiments, an HSD17B13 polynucleotide or a human HSD17B13 gene incorporated into a non-human animal (e.g., a rodent, e.g., a rat or mouse) is represented by or comprises a sequence encoding a human HSD17B13 or genomic locus, or a characteristic portion thereof.

[0859] As used herein, the term “characteristic portion”, in the broadest sense, refers to a portion of a substance whose presence (or absence) correlates with presence (or absence) of a particular feature, attribute, or activity of the substance. In some embodiments, a characteristic portion of a substance is a portion that is found in the substance and in related substances that share the particular feature, attribute or activity, but not in those that do not share the particular feature, attribute or activity. In certain embodiments, a characteristic portion shares at least one functional characteristic with the intact substance. For example, in some embodiments, a “characteristic portion” of a protein or polypeptide is one that contains a continuous stretch of amino acids, or a collection of continuous stretches of amino acids, that together are characteristic of a protein or polypeptide. In some embodiments, each such continuous stretch generally contains at least 2, 5, 10, 15, 20, 50, or more amino acids. In general, a characteristic portion of a substance (e.g., of a protein, antibody, etc.) is one that, in addition to the sequence and/or structural identity specified above, shares at least one functional characteristic with the relevant intact substance. In some embodiments, a characteristic portion may be biologically active.

[0860] Exemplary HSD17B13 coding sequences are described above.

### Exemplary Promoters

[0861] In some embodiments, a construct (e.g., a construct harboring human HSD17B13 gene) comprises a promoter. The term “promoter” refers to a DNA sequence recognized by enzymes/proteins that can promote and/or initiate transcription of an operably linked gene (e.g., a human HSD17B13 gene). For example, a promoter typically refers to, e.g., a nucleotide sequence to which an RNA polymerase and/or any associated factor binds and from which it can initiate transcription. Thus, in some embodiments, a construct (e.g., a targeting construct and/or vector comprising a human HSD17B13 gene) comprises a promoter operably linked to one of the non-limiting example promoters described herein.

[0862] In some embodiments, a promoter is an inducible promoter, a constitutive promoter, a mammalian cell promoter, a viral promoter, a chimeric promoter, an engineered promoter, a tissue-specific promoter, an insertional site endogenous promoter, or any other type of promoter known in the art. In some embodiments, a promoter is a RNA polymerase II promoter, such as a mammalian RNA polymerase II promoter. In some embodiments, a promoter is a RNA polymerase III promoter, including, but not limited to, a HI promoter, a human U6 promoter, a mouse U6 promoter, or a swine U6 promoter. A promoter will generally be one that is able to promote transcription in an inner ear cell. In some embodiments, a promoter is a cochlea-specific promoter or a cochlea-oriented promoter. In some embodiments, a promoter is a hair cell specific promoter, or a supporting cell specific promoter.

[0863] A variety of promoters are known in the art, which can be used herein. Non-limiting examples of promoters that can be used herein include: human EF1α, human cytomegalovirus (CMV)(U.S. Pat. No. 5,168,062), human ubiquitin C (UBC), mouse phosphoglycerate kinase 1, polyoma adenovirus, simian virus 40 (SV40), β-globin, β-actin, α-fetoprotein, γ-globin, β-interferon, γ-glutamyl transferase, mouse mammary tumor virus (MMTV), Rous sarcoma virus, rat insulin, glyceraldehyde-3-phosphate dehydrogenase, metallothionein II (MT II), amylase, cathepsin, MI muscarinic receptor, retroviral LTR (e.g., human T-cell leukemia virus HTLV), AAV ITR, interleukin-2, collagenase, platelet-derived growth factor, adenovirus 5 E2, stromelysin, murine MX gene, glucose regulated proteins (GRP78 and GRP94), α-2-macroglobulin, vimentin, MHC class I gene H-2_{K} b, HSP70, proliferin, tumor necrosis factor, thyroid stimulating hormone a gene, immunoglobulin light chain, T-cell receptor, HLA DQa and DQ, interleukin-2 receptor, MHC class II, MHC class II HLA-DRa, muscle creatine kinase, prealbumin (transthyretin), elastase I, albumin gene, c-fos, c-HA-ras, neural cell adhesion molecule (NCAM), H2B (TH2B)histone, rat growth hormone, human serum amyloid (SAA), troponin I (TN I), duchenne muscular dystrophy, human immunodeficiency virus, and Gibbon Ape Leukemia Virus (GALV) promoters. Additional examples of promoters are known in the art. See, e.g., Lodish, Molecular Cell Biology, Freeman and Company, New York 2007.

[0864] In some embodiments, a promoter is the CMV immediate early promoter. In some embodiments, the promoter is a CAG promoter or a CAG/CBA promoter. In certain embodiments, a promoter comprises a CMV/CBA enhancer/promoter construct. In certain embodiments, a promoter comprises a CAG promoter or CMV/CBA/SV-40 enhancer/promoter construct.

[0865] The term “constitutive” promoter refers to a nucleotide sequence that, when operably linked with a nucleic acid encoding a protein (e.g., a pendrin protein), causes RNA to be transcribed from the nucleic acid in a cell under most or all physiological conditions.

[0866] Examples of constitutive promoters include, without limitation, the retroviral Rous sarcoma virus (RSV) LTR promoter, the cytomegalovirus (CMV) promoter (see, e.g., Boshart et al, Cell 41:521-530, 1985), the SV40 promoter, the dihydrofolate reductase promoter, the beta-actin promoter, the phosphoglycerol kinase (PGK) promoter, and the EFl-alpha promoter (Invitrogen).

[0867] Inducible promoters allow regulation of gene expression and can be regulated by exogenously supplied compounds, environmental factors such as temperature, or the presence of a specific physiological state, e.g., acute phase, a particular differentiation state of the cell, or in replicating cells only. Inducible promoters and inducible systems are available from a variety of commercial sources, including, without limitation, Invitrogen, Clontech, and Ariad. Additional examples of inducible promoters are known in the art.

[0868] Examples of inducible promoters regulated by exogenously supplied compounds include the zinc-inducible sheep metallothionein (MT) promoter, the dexamethasone (Dex)-inducible mouse mammary tumor virus (MMTV) promoter, the T7 polymerase promoter system (WO 98/10088); the ecdysone insect promoter (No et al, Proc. Natl. Acad Sci. US.A. 93:3346-3351, 1996), the tetracycline-repressible system (Gossen et al, Proc. Natl. Acad Sci. US.A. 89:5547-5551, 1992), the tetracycline-inducible system (Gossen et al, Science 268:1766-1769, 1995, see also Harvey et al, Curr. Opin. Chem. Biol. 2:512-518, 1998), the RU486-inducible system (Wang et al, Nat. Biotech. 15:239-243, 1997, and Wang et al, Gene Ther. 4:432-441, 1997), and the rapamycin-inducible system (Magari et al. J Clin. Invest. 100:2865-2872, 1997).

[0869] The term “tissue-specific” promoter refers to a promoter that is active only in certain specific cell types and/or tissues (e.g., transcription of a specific gene occurs only within cells expressing transcription regulatory and/or control proteins that bind to the tissue-specific promoter).

[0870] In some embodiments, regulatory and/or control sequences impart tissue-specific gene expression capabilities. In some cases, tissue-specific regulatory and/or control sequences bind tissue-specific transcription factors that induce transcription in a tissue-specific manner. In some embodiments, a tissue-specific promoter is a central nervous system (CNS) specific promoter. Non-limiting examples of CNS specific promoters include but are not limited to promoters or functional portions thereof for genes: AldhIII, CaMIIα, Dlxl, Dlx5/6, Gad2, GFAP, Grik4, Lepr, Nes, nNOS, Pdgfra, PLP1, Pv (Pvalb), Slc17a6, Sst, Vip, Pcp2, Slc6a3 (DAT), ePet (Fev), Npy2r, Cdh3, and/or Htr6; see e.g., Kim et al., “Mouse Cre-LoxP system: general principles to determine tissue-specific roles of target genes” Laboratory Animal Research (2018) 34(4), 147-159. In certain embodiments, a CNS specific promoter comprises, or consists of, a nucleotide sequence that is the same as, or has at least has at least 70%, 75%, 80%, 85%, 90%, 92%, 94%, 96%, 98%, or 99% homology with promoters for genes: AldhIII, CaMIIα, Dlxl, Dlx5/6, Gad2, GFAP, Grik4, Lepr, Nes, nNOS, Pdgfra, PLP1, Pv (Pvalb), Slc17a6, Sst, Vip, Pcp2, Slc6a3 (DAT), ePet (Fev), Npy2r, Cdh3, and/or Htr6.

[0871] In some embodiments, a tissue-specific promoter is an ocular cell specific promoter. Non-limiting examples of ocular cell specific promoters include but are not limited to promoters or functional portions thereof for genes: EFS, GRK1, CRX, NRL, and/or RCVRN. In certain embodiments, an ocular system specific promoter comprises, or consists of, a nucleotide sequence that is the same as, or has at least has at least 70%, 75%, 80%, 85%, 90%, 92%, 94%, 96%, 98%, or 99% homology with promoters for genes: EFS, GRK1, CRX, NRL, and/or RCVRN.

[0872] In some embodiments, a tissue-specific promoter is a hepatic system specific promoter. Non-limiting examples of hepatic system specific promoters include but are not limited promoters or functional portions thereof for genes: EFS. EF-1a, MSCV, PGK, CAG, ALB, and/or SERPINA1. In certain embodiments, a hepatic system specific promoter comprises, or consists of, a nucleotide sequence that is the same as, or has at least has at least 70%, 75%, 80%, 85%, 90%, 92%, 94%, 96%, 98%, or 99% homology with promoters for genes: EFS, EF-1a, MSCV, PGK, CAG, ALB, and/or SERPINA1.

[0873] In some embodiments, provided nucleic acid constructs comprise a promoter sequence selected from a CAG, a CBA, a CMV, or a CB7 promoter. In certain embodiments, a promoter comprises, or consists of, a nucleotide sequence that is the same as, or has at least has at least 70%, 75%, 80%, 85%, 90%, 92%, 94%, 96%, 98%, or 99% homology with a CAG, a CBA, a CMV, or a CB7 promoter.

[0874] In some embodiments of any of the nucleic acid constructs described herein, the first or sole nucleic acid constructs further includes at least one promoter sequence or functional portion thereof selected from CNS, Ocular, and/or Hepatic cell specific promoters.

### Exemplary Enhancers

[0875] In some instances, a construct can include an enhancer sequence. In some embodiments, the term “enhancer” refers to a nucleotide sequence that can increase the level of transcription of a nucleic acid encoding a protein of interest (e.g., a human and/or NHP HSD17B13 protein). Enhancer sequences (generally 50-1500 bp in length) generally increase the level of transcription by providing additional binding sites for transcription-associated proteins (e.g., transcription factors). In some embodiments, an enhancer sequence is found within an intronic sequence. Unlike promoter sequences, enhancer sequences can act at much larger distance away from the transcription start site (e.g., as compared to a promoter). Non-limiting examples of enhancers include a RSV enhancer, a CMV enhancer, and/or a SV40 enhancer. In some embodiments, a construct comprises a CMV enhancer, In some embodiments, an SV-40 derived enhancer is the SV-40 T intron sequence. In some embodiments, an enhancer sequence is woodchuck hepatitis virus post-transcriptional regulatory element (WPRE).

### Exemplary Coding Sequence Flanking Untranslated Regions

[0876] In some embodiments, any of the constructs described herein can include an untranslated region (UTR), such as a 5′ UTR or a 3′ UTR. UTRs of a gene are transcribed but not translated. A 5′ UTR starts at the transcription start site and continues to the start codon but does not include the start codon. A 3′ UTR starts immediately following the stop codon and continues until the transcriptional termination signal. The regulatory and/or control features of a UTR can be incorporated into any of the constructs, compositions, kits, or methods as described herein to enhance or otherwise modulate the expression of an HSD17B13 protein.

[0877] Natural 5′ UTRs include a sequence that plays a role in translation initiation. in some embodiments, a 5′ UTR can comprise sequences, like Kozak sequences, which are commonly known to be involved in the process by which the ribosome initiates translation of many genes. Kozak sequences have the consensus sequence CCR(A/G)CCAUGG, where R is a purine (A or G) three bases upstream of the start codon (AUG), and the start codon is followed by another “G”. In certain embodiments, a KOZAK sequence is GCCACC. The 5′ UTRs have also been known to form secondary structures that are involved in elongation factor binding.

[0878] In some embodiments, a 5′ UTR is included in any of the constructs described herein. Non-limiting examples of 5′ UTRs, including those from the following genes: albumin, serum amyloid A, Apolipoprotein A/B/E, transferrin, alpha fetoprotein, erythropoietin, Factor VIII, and HSD17B13 can be used to enhance expression of a nucleic acid molecule, such as an mRNA.

[0879] In some embodiments, a 5′ UTR from an mRNA that is transcribed by a cell in the CNS can be included in any of the constructs, compositions, kits, and methods described herein. In some embodiments, a 5′ UTR is derived from the endogenous HSD17B13 gene loci.

[0880] 3′ UTRs are found immediately 3′ to the stop codon of the gene of interest. In some embodiments, a 3′ UTR from an mRNA that is transcribed by a cell in the CNS can be included in any of the constructs, compositions, kits, and methods described herein. In some embodiments, a 3′ UTR is derived from the endogenous HSD17B13 gene loci and may include all or part of the endogenous sequence.

[0881] 3′ UTRs are known to have stretches of adenosines and uridines (in the RNA form) or thymidines (in the DNA form) embedded in them. These AU-rich signatures are particularly prevalent in genes with high rates of turnover. Based on their sequence features and functional properties, the AU-rich elements (AREs) can be separated into three classes (Chen et al., Mal. Cell. Biol. 15:5777-5788, 1995; Chen et al., Mal. Cell Biol. 15:2010-2018, 1995): Class I AREs contain several dispersed copies of an AUUUA motif within U-rich regions. For example, c-Myc and MyoD mRNAs contain class I AREs. Class II AREs possess two or more overlapping UUAUUUA(U/A) (U/A) nonamers. GM-CSF and TNF-alpha mRNAs are examples that contain class II AREs. Class III AREs are less well defined. These U-rich regions do not contain an AUUUA motif, two well-studied examples of this class are c-Jun and myogenin mRNAs.

[0882] Most proteins binding to the AREs are known to destabilize the messenger, whereas members of the ELAV family, most notably HuR, have been documented to increase the stability of mRNA. HuR binds to AREs of all the three classes. Engineering the HuR specific binding sites into the 3′ UTR of nucleic acid molecules will lead to HuR binding and thus, stabilization of the message in vivo.

[0883] In some embodiments, the introduction, removal, or modification of 3′ UTR AREs can be used to modulate the stability of an mRNA encoding an HSD17B13 protein. In other embodiments, AREs can be removed or mutated to increase the intracellular stability and thus increase translation and production of an HSD17B13 protein.

[0884] In other embodiments, non-ARE sequences may be incorporated into the 5′ or 3′ UTRs. In some embodiments, introns or portions of intron sequences may be incorporated into the flanking regions of the polynucleotides in any of the constructs, compositions, kits, and methods provided herein. Incorporation of intronic sequences may increase protein production as well as mRNA levels.

### Exemplary Internal Ribosome Entry Sites (IRES)

[0885] In some embodiments, a construct encoding an HSD17B13 protein can include an internal ribosome entry site (IRES). An IRES forms a complex secondary structure that allows translation initiation to occur from any position with an mRNA immediately downstream from where the IRES is located (see, e.g., Pelletier and Sonenberg, Mal. Cell. Biol. 8(3):1103-1112, 1988).

[0886] There are several IRES sequences known to those in skilled in the art, including those from, e.g., foot and mouth disease virus (FMDV), encephalomyocarditis virus (EMCV), human rhinovirus (HRV), cricket paralysis virus, human immunodeficiency virus (HIV), hepatitis A virus (HAV), hepatitis C virus (HCV), and poliovirus (PV). See e.g., Alberts, Molecular Biology of the Cell, Garland Science, 2002; and Hellen et al., Genes Dev. 15(13):1593-612, 2001.

[0887] In some embodiments, the IRES sequence that is incorporated into a construct that encodes an HSD17B13 protein is the foot and mouth disease virus (FMDV) 2A sequence. The Foot and Mouth Disease Virus 2A sequence is a small peptide (approximately 18 amino acids in length) that has been shown to mediate the cleavage of polyproteins (Ryan, M D et al., EMBO 4:928-933, 1994; Mattion et al., J Virology 70:8124-8127, 1996; Furler et al., Gene Therapy 8:864-873, 2001; and Halpin et al., Plant Journal 4:453-459, 1999). The cleavage activity of the 2A sequence has previously been demonstrated in artificial systems including plasmids and gene therapy constructs (AAV and retroviruses) (Ryan et al., EMBO 4:928-933, 1994; Mattion et al., J Virology 70:8124-8127, 1996; Furler et al., Gene Therapy 8:864-873, 2001; and Halpin et al., Plant Journal 4:453-459, 1999; de Felipe et al., Gene Therapy 6:198-208, 1999; de Felipe et al., Human Gene Therapy I I: 1921-1931, 2000; and Klump et al., Gene Therapy 8:811-817, 2001).

[0888] An IRES can be utilized in an any constructs described herein. In some embodiments, an IRES can be part of a composition comprising more than one construct. In some embodiments, an IRES is used to produce more than one polypeptide from a single gene transcript.

### Exemplary Splice Sites

[0889] In some embodiments, any of the constructs provided herein can include splice donor and/or splice acceptor sequences, which are functional during RNA processing occurring during transcription. In some embodiments, splice sites are involved in trans-splicing.

### Exemplary Polyadenylation Sequences

[0890] In some embodiments, a construct provided herein can include a polyadenylation (poly(A)) signal sequence. Most nascent eukaryotic mRNAs possess a poly(A) tail at their 3′ end, which is added during a complex process that includes cleavage of the primary transcript and a coupled polyadenylation reaction driven by the poly(A) signal sequence (see, e.g., Proudfoot et al., Cell 108:501-512, 2002). A poly(A) tail confers mRNA stability and transferability (Molecular Biology of the Cell, Third Edition by B. Alberts et al., Garland Publishing, 1994). In some embodiments, a poly(A) signal sequence is positioned 3′ to the coding sequence.

[0891] As used herein, “polyadenylation” refers to the covalent linkage of a polyadenylyl moiety, or its modified variant, to a messenger RNA molecule. In eukaryotic organisms, most messenger RNA (mRNA) molecules are polyadenylated at the 3′ end. A 3′ poly(A) tail is a long sequence of adenine nucleotides (e.g., 50, 60, 70, 100, 200, 500, 1000, 2000, 3000, 4000, or 5000) added to the pre-mRNA through the action of an enzyme, polyadenylate polymerase. In some embodiments, a poly(A) tail is added onto transcripts that contain a specific sequence, e.g., a poly(A) signal. A poly(A) tail and associated proteins aid in protecting mRNA from degradation by exonucleases. Polyadenylation also plays a role in transcription termination, export of the mRNA from the nucleus, and translation. Polyadenylation typically occurs in the nucleus immediately after transcription of DNA into RNA, but also can occur later in the cytoplasm. After transcription has been terminated, an mRNA chain is cleaved through the action of an endonuclease complex associated with RNA polymerase. A cleavage site is usually characterized by the presence of the base sequence AAUAAA near the cleavage site. After the mRNA has been cleaved, adenosine residues are added to the free 3′ end at the cleavage site.

[0892] As used herein, a “poly(A) signal sequence” or “polyadenylation signal sequence” is a sequence that triggers the endonuclease cleavage of an mRNA and the addition of a series of adenosines to the 3′ end of the cleaved mRNA.

[0893] There are several poly(A) signal sequences that can be used, including those derived from bovine growth hormone (bGH)(Woychik et al., Proc. Natl. Acad Sci. US.A. 81(13):3944-3948, 1984; U.S. Pat. No. 5,122,458), mouse-β-globin, mouse-a-globin (Orkin et al., EMBO J 4(2):453-456, 1985; Thein et al., Blood 71(2):313-319, 1988), human collagen, polyoma virus (Batt et al., Mal. Cell Biol. 15(9):4783-4790, 1995), the Herpes simplex virus thymidine kinase gene (HSV TK), IgG heavy-chain gene polyadenylation signal (US 2006/0040354), human growth hormone (hGH) (Szymanski et al., Mal. Therapy 15(7):1340-1347, 2007), the group consisting of SV40 poly(A) site, such as the SV40 late and early poly(A) site (Schek et al., Mal. Cell Biol. 12(12):5386-5393, 1992).

[0894] The poly(A) signal sequence can be AATAAA. The AATAAA sequence may be substituted with other hexanucleotide sequences with homology to AATAAA and that are capable of signaling polyadenylation, including ATTAAA, AGTAAA, CATAAA, TATAAA, GATAAA, ACTAAA, AATATA, AAGAAA, AATAAT, AAAAAA, AATGAA, AATCAA, AACAAA, AATCAA, AATAAC, AATAGA, AATTAA, or AATAAG (see, e.g., WO 06/12414).

[0895] In some embodiments, a poly(A) signal sequence can be a synthetic polyadenylation site (see, e.g., the pCl-neo expression construct of Promega that is based on Levitt el al, Genes Dev. 3(7):1019-1025, 1989). In some embodiments, a poly(A) signal sequence is the polyadenylation signal of soluble neuropilin-1 (sNRP) (AAATAAAATACGAAATG) (see, e.g., WO 05/073384). In some embodiments, a poly(A) signal sequence comprises or consists of bGHpA. In some embodiments, a poly(A) signal sequence comprises or consists of the SV40 poly(A) site. Additional examples of poly(A) signal sequences are known in the art.

### Exemplary Destabilization Domains

[0896] In some embodiments, any of the constructs provided herein can optionally include a sequence encoding a destabilizing domain (“a destabilizing sequence”) for temporal control of protein expression. Non-limiting examples of destabilizing sequences include sequences encoding a FK506 sequence, a dihydrofolate reductase (DHFR) sequence, or other exemplary destabilizing sequences.

[0897] In the absence of a stabilizing ligand, a protein sequence operatively linked to a destabilizing sequence is degraded by ubiquitination. In contrast, in the presence of a stabilizing ligand, protein degradation is inhibited, thereby allowing the protein sequence operatively linked to the destabilizing sequence to be actively expressed. As a positive control for stabilization of protein expression, protein expression can be detected by conventional means, including enzymatic, radiographic, colorimetric, fluorescence, or other spectrographic assays; fluorescent activating cell sorting (FACS) assays; immunological assays (e.g., enzyme linked immunosorbent assay (ELISA), radioimmunoassay (RIA), and immunohistochemistry).

[0898] Additional examples of destabilizing sequences are known in the art. In some embodiments, the destabilizing sequence is a FK506- and rapamycin-binding protein (FKBP12) sequence, and the stabilizing ligand is Shield-1 (Shld1) (Banaszynski et al. (2012) Cell 126(5): 995-1004). In some embodiments, a destabilizing sequence is a DHFR sequence, and a stabilizing ligand is trimethoprim (TMP) (Iwamoto et al. (2010) Chem Biol 17:981-988).

[0899] In some embodiments, a destabilizing sequence is a FKBP12 sequence, and a presence of a nucleic acid construct carrying the FKBP12 gene in a subject cell (e.g., a rodent cell, e.g., a rat or mouse cell) is detected by western blotting. In some embodiments, a destabilizing sequence can be used to verify the temporally-specific activity of any of the nucleic acid constructs described herein.

### Exemplary Reporter Sequences or Elements

[0900] In some embodiments, constructs provided herein can optionally include a sequence encoding a reporter polypeptide and/or protein (“a reporter sequence”). Non-limiting examples of reporter sequences include DNA sequences encoding: a beta-lactamase, a beta-galactosidase (LacZ), an alkaline phosphatase, a thymidine kinase, a green fluorescent protein (GFP), a red fluorescent protein, an mCherry fluorescent protein, a yellow fluorescent protein, a chloramphenicol acetyltransferase (CAT), and a luciferase. Additional examples of reporter sequences are known in the art. When associated with control elements which drive their expression, the reporter sequence can provide signals detectable by conventional means, including enzymatic, radiographic, colorimetric, fluorescence, or other spectrographic assays; fluorescent activating cell sorting (FACS) assays; immunological assays (e.g., enzyme linked immunosorbent assay (ELISA), radioimmunoassay (RIA), and immunohistochemistry).

[0901] In some embodiments, a reporter sequence is the LacZ gene, and the presence of a construct carrying the LacZ gene in a non-human cell (e.g., a rodent cell, e.g., a rat or mouse cell) is detected by assays for beta-galactosidase activity. When the reporter is a fluorescent protein (e.g., green fluorescent protein) or luciferase, the presence of a construct carrying the fluorescent protein or luciferase in a non-human cell (e.g., a rodent cell, e.g., a rat or mouse) may be measured by fluorescent techniques (e.g., fluorescent microscopy or FACS) or light production in a luminometer (e.g., a spectrophotometer or an IVIS imaging instrument). In some embodiments, a reporter sequence can be used to verify the tissue-specific targeting capabilities and tissue-specific promoter regulatory and/or control activity of any of the constructs described herein.

[0902] In some embodiments, a reporter sequence is a FLAG tag (e.g., a 3×FLAG tag), and the presence of a construct carrying the FLAG tag in a non-human cell (e.g., a rodent cell, e.g., a rat or mouse) is detected by protein binding or detection assays (e.g., Western blots, immunohistochemistry, radioimmunoassay (RIA), mass spectrometry).

### Targeting Vectors

[0903] Targeting vectors can be employed to introduce a nucleic acid construct into a target genomic locus. Targeting vectors can comprise a nucleic acid construct and homology arms that flank said nucleic acid construct; those skilled in the art will be aware of a variety of options and features generally applicable to the design, structure, and/or use of targeting vectors. For example, targeting vectors can be in linear form or in circular form, and they can be single-stranded or double-stranded. Targeting vectors can be deoxyribonucleic acid (DNA) or ribonucleic acid (RNA). For ease of reference, homology arms are referred to herein as 5′ and 3′ (i.e., upstream and downstream, i.e., left and right)homology arms. This terminology relates to the relative position of the homology arms to a nucleic acid construct within a targeting vector. 5′ and 3′ homology arms correspond to regions within a targeted locus or to a region within another targeting vector, which are referred to herein as “5′ target sequence” and “3′ target sequence,” respectively. In some embodiments, homology arms can also function as a 5′ or a 3′ target sequence. In some embodiments, the present disclosure provides targeting vectors comprising a provided technology whose sequence encodes an HSD17B13 polypeptide or a characteristic portion thereof as described herein.

[0904] In some embodiments, methods described herein provide for traditional transgenic non-human animal creation. In such embodiments, a vector comprising an exogenous HSD17B13 gene is injected into a zygote and integrated randomly within the genome. In some embodiments, such a random insertion site may be within a protein coding region and may result in the modification of function of an endogenous protein and/or gene. In some such embodiments, an exogenous HSD17B13 gene may be incorporated as solely a coding region, as a coding region including a protein tag, as a coding region with an operably linked promoter, as a coding region including a poly(A) site, as a coding region including any additional regulatory region, or as any combination thereof.

[0905] In some embodiments, methods described herein provide for traditional transgenic non-human animal creation utilizing the Tol2 transposon system. In such embodiments, a vector comprising an exogenous HSD17B13 gene is injected into a zygote and integrated randomly within an ANT rich region of the genome. In some embodiments, such a random insertion site may be within a protein coding region and may result in the modification of function of an endogenous protein and/or gene. In some such embodiments, an exogenous HSD17B13 gene may be incorporated as solely a coding region, as a coding region including a protein tag, as a coding region with an operably linked promoter, as a coding region including a poly(A) site, as a coding region including any additional regulatory region, or as any combination thereof. In some embodiments, methods described herein providing for traditional transgenic non-human animal creation may utilize large genomic fragments (e.g., 1 mb, 10 mb, 100 mb, and/or 1000 mb). In some embodiments, traditional transgenic non-human animals may comprise transgenic regions including promoters, introns, exons, and/or additional genomic regulatory regions. In some embodiments, traditional transgenic non-human animal creation may utilize a yeast artificial chromosome (YAC), a bacterial artificial chromosome (BAC), a human artificial chromosome, a P1-derived artificial chromosome (PAC), or any other engineered region which may be contained in an appropriate host cell.

[0906] In some embodiments, methods described herein employ two, three or more targeting vectors that are capable of recombining with each other. In some embodiments, first, second, and third targeting vectors each comprise a 5′ and a 3′ homology arm. The 3′ homology arm of the first targeting vector comprises a sequence that overlaps with the 5′ homology arm of the second targeting vector (i.e., overlapping sequences), which allows for homologous recombination between first and second vector.

[0907] In some embodiments of double component targeting methods, a 5′homology arm of a first targeting vector and a 3′ homology arm of a second targeting vector can be similar to corresponding segments within a target genomic locus (i.e., a target sequence), which can promote homologous recombination of the first and the second targeting vectors with corresponding genomic segments and modify the target genomic locus.

[0908] In some embodiments of triple component targeting methods, a 3′ homology arm of a second targeting vector can comprise a sequence that overlaps with a 5′ homology arm of a third targeting vector (i.e., overlapping sequences), which can allow for homologous recombination between the second and the third targeting vector. The 5′ homology arm of the first targeting vector and the 3′ homology arm of the third targeting vector are similar to corresponding segments within the target genomic locus (i.e., the target sequence), which can promote homologous recombination of the first and the third targeting vectors with the corresponding genomic segments and modify the target genomic locus.

[0909] In some embodiments, a homology arm and a target sequence or two homology arms “correspond” or are “corresponding” to one another when the two regions share a sufficient level of sequence identity to one another so that they can act as substrates for a homologous recombination reaction. The sequence identity between a given target sequence and the corresponding homology arm found on a targeting vector (i.e., overlapping sequence) or between two homology arms can be any degree of sequence identity that allows for homologous recombination to occur. To give but one example, an amount of sequence identity shared by a homology arm of a targeting vector (or a fragment thereof) and a target sequence of another targeting vector or a target sequence of a target genomic locus (or a fragment thereof) can be, e.g., but not limited to, at least 50%, 55%, 60%, 65%, 70%, 75%, 80%, 81%, 82%, 83%, 84%, 85%, 86%, 87%, 88%, 89%, 90%, 91%, 92%, 93%, 94%, 95%, 96%, 97%, 98%, 99% or 100% sequence identity, such that the sequences undergo homologous recombination.

[0910] Moreover, a corresponding region of similarity (e.g., identity) between a homology arm and a corresponding target sequence can be of any length that is sufficient to promote homologous recombination at the target genomic locus. For example, a given homology arm and/or corresponding target sequence can comprise corresponding regions of similarity that are but are not limited to, about 0.2-0.5 kb, 0.2-1 kb, 0.2-1.5 kb, 0.2-2 kb, 0.2-2.5 kb, 0.2-3 kb, 0.2-3.5 kb, 0.2-4 kb, 0.2-4.5 kb, or 0.2-5 kb in length such that a homology arm has sufficient similarity to undergo homologous recombination with a corresponding target sequence(s) within a target genomic locus of the cell or within another targeting vector. In some embodiments, a given homology arm and/or corresponding target sequence can comprise corresponding regions of similarity that are, e.g., but not limited to, about 5-10 kb, 5-15 kb, 5-20 kb, 5-25 kb, 5-30 kb, 5-35 kb, 5-40 kb, 5-45 kb, 5-50 kb, 5-55 kb, 5-60 kb, 5-65 kb, 5-70 kb, 5- 75 kb, 5-80 kb, 5-85 kb, 5-90 kb, 5-95 kb, 5-100 kb, 100-200 kb, or 200-300 kb in length (such as described elsewhere herein) such that a homology arm has sufficient similarity to undergo homologous recombination with a corresponding target sequence(s) within a target genomic locus of the cell or within another targeting vector. In some embodiments, a given homology arm and/or corresponding target sequence comprise corresponding regions of similarity that are, e.g., but not limited to, about 10-100 kb, 15-100 kb, 20-100 kb, 25-100 kb, 30-100 kb, 35-100 kb, 40-100 kb, 45-100 kb, 50-100 kb, 55-100 kb, 60-100 kb, 65-100 kb, 70-100 kb, 75-100 kb, 80-100 kb, 85-100 kb, 90-100 kb, or 95-100 kb in length (such as described elsewhere herein) such that a homology arm has sufficient similarity to undergo homologous recombination with a corresponding target sequence(s) within a target genomic locus of the cell or within another targeting vector.

[0911] In some embodiments, overlapping sequences of a 3′ homology arm of a first targeting vector and a 5′ homology arm of a second targeting vector or of a 3′ homology arm of a second targeting vector and a 5′ homology arm of a third targeting vector can be of any length that is sufficient to promote homologous recombination between said targeting vectors. For example, a given homology arm and/or corresponding target sequence can comprise corresponding regions of similarity that are, e.g., but not limited to, about 0.2-0.5 kb, 0.2-1 kb, 0.2-1.5 kb, 0.2-2 kb, 0.2-2.5 kb, 0.2-3 kb, 0.2-3.5 kb, 0.2-4 kb, 0.2-4.5 kb, or 0.2-5 kb in length such that a homology arm has sufficient similarity to undergo homologous recombination with a corresponding target sequence(s) within a target genomic locus of the cell or within another targeting vector. In some embodiments, a given overlapping sequence of a homology arm can comprise corresponding overlapping regions that are about 1-5 kb, 5-10 kb, 5-15 kb, 5-20 kb, 5-25 kb, 5-30 kb, 5-35 kb, 5-40 kb, 5-45 kb, 5-50 kb, 5-55 kb, 5-60 kb, 5-65 kb, 5-70 kb, 5-75 kb, 5- 80 kb, 5-85 kb, 5-90 kb, 5-95 kb, 5-100 kb, 100-200 kb, or 200-300 kb in length such that an overlapping sequence of a homology arm has sufficient similarity to undergo homologous recombination with a corresponding overlapping sequence within another targeting vector. In some embodiments, a given overlapping sequence of a homology arm comprises an overlapping region that is about 1-100 kb, 5-100 kb, 10-100 kb, 15-100 kb, 20-100 kb, 25-100 kb, 30-100 kb, 35-100 kb, 40-100 kb, 45-100 kb, 50-100 kb, 55-100 kb, 60-100 kb, 65-100 kb, 70-100 kb, 75-100 kb, 80-100 kb, 85-100 kb, 90-100 kb, or 95-100 kb in length such that an overlapping sequence of a homology arm has sufficient similarity to undergo homologous recombination with a corresponding overlapping sequence within another targeting vector. In some embodiments, an overlapping sequence is from 1-5 kb, inclusive. In some embodiments, an overlapping sequence is from about 1 kb to about 70 kb, inclusive. In some embodiments, an overlapping sequence is from about 10 kb to about 70 kb, inclusive. In some embodiments, an overlapping sequence is from about 10 kb to about 50 kb, inclusive. In some embodiments, an overlapping sequence is at least 10 kb. In some embodiments, an overlapping sequence is at least 20 kb. For example, an overlapping sequence can be from about 1 kb to about 5 kb, inclusive, from about 5 kb to about 10 kb, inclusive, from about 10 kb to about 15 kb, inclusive, from about 15 kb to about 20 kb, inclusive, from about 20 kb to about 25 kb, inclusive, from about 25 kb to about 30 kb, inclusive, from about 30 kb to about 35 kb, inclusive, from about 35 kb to about 40 kb, inclusive, from about 40 kb to about 45 kb, inclusive, from about 45 kb to about 50 kb, inclusive, from about 50 kb to about 60 kb, inclusive, from about 60 kb to about 70 kb, inclusive, from about 70 kb to about 80 kb, inclusive, from about 80 kb to about 90 kb, inclusive, from about 90 kb to about 100 kb, inclusive, from about 100 kb to about 120 kb, inclusive, from about 120 kb to about 140 kb, inclusive, from about 140 kb to about 160 kb, inclusive, from about 160 kb to about 180 kb, inclusive, from about 180 kb to about 200 kb, inclusive, from about 200 kb to about 220 kb, inclusive, from about 220 kb to about 240 kb, inclusive, from about 240 kb to about 260 kb, inclusive, from about 260 kb to about 280 kb, inclusive, or about 280 kb to about 300 kb, inclusive. To give but one example, an overlapping sequence can be from about 20 kb to about 60 kb, inclusive. Alternatively, an overlapping sequence can be at least 1 kb, at least 5 kb, at least 10 kb, at least 15 kb, at least 20 kb, at least 25 kb, at least 30 kb, at least 35 kb, at least 40 kb, at least 45 kb, at least 50 kb, at least 60 kb, at least 70 kb, at least 80 kb, at least 90 kb, at least 100 kb, at least 120 kb, at least 140 kb, at least 160 kb, at least 180 kb, at least 200 kb, at least 220 kb, at least 240 kb, at least 260 kb, at least 280 kb, or at least 300 kb. In some embodiments, an overlapping sequence can be at most 400 kb, at most 350 kb, at most 300 kb, at most 280 kb, at most 260 kb, at most 240 kb, at most 220 kb, at most 200 kb, at most 180 kb, at most 160 kb, at most 140 kb, at most 120 kb, at most 100 kb, at most 90 kb, at most 80 kb, at most 70 kb, at most 60 kb or at most 50 kb.

### Exemplary Sites For Genomic Incorporation

[0912] Homology arms can, in some embodiments, correspond to a locus that is native to a cell (e.g., a targeted locus), or alternatively they can correspond to a region of a heterologous or exogenous segment of DNA that was integrated into the genome of the cell, including, for example, transgenes, expression cassettes, or heterologous or exogenous regions of DNA. In some embodiments, homology arms can, correspond to a region on a targeting vector in a cell. In some embodiments, homology arms of a targeting vector may correspond to a region of a yeast artificial chromosome (YAC), a bacterial artificial chromosome (BAC), a human artificial chromosome, a P1-derived artificial chromosome (PAC), or any other engineered region contained in an appropriate host cell. Still further, homology arms of a targeting vector may correspond to or be derived from a region of a BAC library, a cosmid library, or a P1 phage library. In some certain embodiments, homology arms of a targeting vector correspond to a locus that is native, heterologous, or exogenous to a prokaryote, a yeast, a bird (e.g., chicken), a non-human mammal, a rodent, a human, a rat, a mouse, a hamster a rabbit, a pig, a bovine, a deer, a sheep, a goat, a cat, a dog, a ferret, a primate (e.g., marmoset, rhesus monkey), a domesticated mammal, an agricultural mammal, or any other organism of interest. In some embodiments, homology arms correspond to a locus of the cell that shows limited susceptibility to targeting using a conventional method or that has shown relatively low levels of successful integration at a targeted site, and/or significant levels of off-target integration, in the absence of a nick or double-strand break induced by a nuclease agent (e.g., a Cas protein, a Zinc Finger nuclease protein, and/or a TALEN protein). In some embodiments, homology arms are designed to include engineered DNA.

[0913] In some embodiments, 5′ and 3′ homology arms of a targeting vector(s) correspond to a targeted genome. Alternatively, homology arms correspond to a related genome. For example, a targeted genome is a mouse genome of a first strain, and targeting arms correspond to a mouse genome of a second strain, wherein the first strain and the second strain are different.

[0914] In certain embodiments, homology arms correspond to the genome of the same animal or are from the genome of the same strain, e.g., the targeted genome is a mouse genome of a first strain, and the targeting arms correspond to a mouse genome from the same mouse or from the same strain.

[0915] A homology arm of a targeting vector can be of any length that is sufficient to promote a homologous recombination event with a corresponding target sequence, including, for example, 0.2-1 kb, inclusive, 1-5 kb, inclusive, 5-10 kb, inclusive, 5-15 kb, inclusive, 5-20 kb, inclusive, 5-25 kb, inclusive, 5-30 kb, inclusive, 5-35 kb, inclusive, 5-40 kb, inclusive, 5-45 kb, inclusive, 5-50 kb, inclusive, 5-55 kb, inclusive, 5-60 kb, inclusive, 5-65 kb, inclusive, 5-70 kb, inclusive, 5-75 kb, inclusive, 5-80 kb, inclusive, 5-85 kb, inclusive, 5-90 kb, inclusive, 5-95 kb, inclusive, 5-100 kb, inclusive, 100-200 kb, inclusive, or 200-300 kb, inclusive, in length. In some embodiments, a homology arm of a targeting vector has a length that is sufficient to promote a homologous recombination event with a corresponding target sequence that is 0.2-100 kb, inclusive, 1-100 kb, inclusive, 5-100 kb, inclusive, 10-100 kb, inclusive, 15-100 kb, inclusive, 20-100 kb, inclusive, 25-100 kb, inclusive, 30-100 kb, inclusive, 35-100 kb, inclusive, 40-100 kb, inclusive, 45-100 kb, inclusive, 50-100 kb, inclusive, 55-100 kb, inclusive, 60-100 kb, inclusive, 65-100 kb, inclusive, 70-100 kb, inclusive, 75-100 kb, inclusive, 80-100 kb, inclusive, 85-100 kb, inclusive, 90-100 kb, inclusive, or 95-100 kb, inclusive, in length. As described herein, large targeting vectors can employ targeting arms of greater length.

[0916] In certain embodiments, an HSD17B13 polynucleotide or an exogenous HSD17B13 locus is incorporated into a non-human animal (e.g., a rodent, e.g., a rat or mouse) at an endogenous locus. In some cases, an endogenous locus is an HSD17B13 locus. In some such cases, an endogenous HSD17B13 locus may be replaced with an exogenous HSD17B13 gene. In some embodiments, replacement may be partial, or may be complete. In some embodiments, an HSD17B13 polynucleotide or an exogenous HSD17B13 gene is incorporated into an endogenous HSD17B13 locus and is operably linked to an endogenous HSD17B13 promoter.

[0917] In certain embodiments, an HSD17B13 polynucleotide or an exogenous HSD17B13 locus is incorporated into a non-human animal (e.g., a rodent, e.g., a rat or mouse) at an endogenous locus. In some cases, an endogenous locus is a locus driven by a constitutive promoter. In some embodiments, an endogenous locus is a locus driven by a tissue specific promoter.

[0918] In certain embodiments, an HSD17B13 polynucleotide or an exogenous HSD17B13 gene is incorporated into a non-human animal (e.g., a rodent, e.g., a rat or mouse) at a site amenable to Cre/LoxP manipulation. In certain embodiments, an HSD17B13 polynucleotide or an exogenous HSD17B13 is incorporated into a site or is located within a targeting vector flanked by LoxP recombination sites. In certain embodiments, a non-human animal (e.g., a rodent, e.g., a rat or mouse) with an exogenous HSD17B13 gene comprising or incorporated into a site flanked by LoxP sites can further be crossed with an animal expressing a Cre recombinase under the control of one or more of a tissue specific, temporally specific, and/or inducible promoter.

[0919] In certain embodiments, an HSD17B13 polynucleotide or an exogenous HSD17B13 gene is incorporated into a non-human animal (e.g., rodent, e.g., rat or mouse), non-human (e.g., rodent, e.g., rat or mouse) cell or non-human (e.g., rodent, e.g., rat or mouse) tissue at a locus amenable for manipulation using Cre-Lox P and/or Flp-FRT; see E.g., Kim et al., “Mouse Cre-LoxP system: general principles to determine tissue-specific roles of target genes” Laboratory Animal Research (2018) 34(4), 147-159.

[0920] In certain embodiments, an HSD17B13 polynucleotide or an exogenous HSD17B13 gene is incorporated into a non-human animal (e.g., rodent, e.g., rat or mouse), non-human (e.g., rodent, e.g., rat or mouse) cell or non-human (e.g., rodent, e.g., rat or mouse) tissue at a Cre/LoxP stop or inducible Cre/LoxP site. In certain such embodiments, when crossed with a mouse that has Cre under a tissue specific promoter, said locus can generate tissue specific exogenous HSD17B13 expression in transgenic animals.

[0921] In some embodiments of a non-human animal (e.g., rodent, e.g., rat or mouse), non-human (e.g., rodent, e.g., rat or mouse) cell or non-human (e.g., rodent, e.g., rat or mouse) tissue as described herein, the non-human animal, non-human cell or non-human tissue is homozygous or heterozygous for an exogenous HSD17B13 gene integrated at a site operably linked to an inducible promoter (e.g., a tetracycline-responsive element, an estrogen receptor targeting motif, and/or under the control of tamoxifen).

[0922] In certain embodiments, an HSD17B13 polynucleotide or an exogenous HSD17B13 gene is incorporated into a non-human animal (e.g., rodent, e.g., rat or mouse), non-human (e.g., rodent, e.g., rat or mouse) cell or non-human (e.g., rodent, e.g., rat or mouse) tissue at a locus known to function as a transcriptional hotspot, and/or transcriptional safe harbor (such as are abundant and well known in the art).

[0923] In certain embodiments, an HSD17B13 polynucleotide or an exogenous HSD17B13 gene is incorporated into a non-human animal (e.g., rodent, e.g., rat or mouse), non-human (e.g., rodent, e.g., rat or mouse) cell or non-human (e.g., rodent, e.g., rat or mouse) tissue at the ROSA26 locus.

[0924] In certain embodiments, an HSD17B13 polynucleotide or an exogenous HSD17B13 gene is incorporated into a non-human animal (e.g., rodent, e.g., rat or mouse), non-human (e.g., rodent, e.g., rat or mouse) cell or non-human (e.g., rodent, e.g., rat or mouse) tissue at the H11 locus.

[0925] In certain embodiments, an HSD17B13 polynucleotide or an exogenous HSD17B13 gene is incorporated into a non-human animal (e.g., rodent, e.g., rat or mouse), non-human (e.g., rodent, e.g., rat or mouse) cell or non-human (e.g., rodent, e.g., rat or mouse) tissue at the TIGRE locus.

[0926] In certain embodiments, an HSD17B13 polynucleotide or an exogenous HSD17B13 gene is incorporated into a non-human animal (e.g., rodent, e.g., rat or mouse), non-human (e.g., rodent, e.g., rat or mouse) cell or non-human (e.g., rodent, e.g., rat or mouse) tissue at the MYH9 locus.

[0927] In some embodiments of a non-human animal (e.g., rodent, e.g., rat or mouse), non-human (e.g., rodent, e.g., rat or mouse) cell or non-human (e.g., rodent, e.g., rat or mouse) tissue as described herein, the non-human animal, non-human cell or non-human tissue is homozygous or heterozygous for an HSD17B13 polynucleotide or an exogenous HSD17B13 gene integrated at a site operably linked to a universally expressed promoter (e.g., CMV, SV40, elongation factor 1 alpha, CBA/CAGG, ubiquitin C, and/or phosphoglycerate kinase 1).

### Nuclease Agents Facilitating Targeting Vector Integration

[0928] In some embodiments, nuclease agents (e.g., CRISPR/Cas systems, Zinc Finger Nucleases, and/or TALENs) can be employed in combination with targeting vectors to facilitate the modification of a target locus (e.g., modification of an HSD17B13 locus and/or modification of a locus targeted for exogenous protein insertion). Such nuclease agents and their use are well known in the art, and may promote homologous recombination between a targeting vector and a target locus. When nuclease agents are employed in combination with a targeting vector, the targeting vector can comprise 5′ and 3′ homology arms corresponding to 5′ and 3′ target sequences located in sufficient proximity to a nuclease cleavage site so as to promote the occurrence of a homologous recombination event between target sequences and homology arms upon a nick or double-strand break at the nuclease cleavage site. In some embodiments, the term “nuclease cleavage site” includes a DNA sequence at which a nick or double-strand break is created by a nuclease agent (e.g., a Cas9 cleavage site). Target sequences within a targeted locus that correspond to 5′ and 3′ homology arms of a targeting vector are “located in sufficient proximity” to a nuclease cleavage site if the distance is such as to promote the occurrence of a homologous recombination event between 5′ and 3′ target sequences and homology arms upon a nick or double-strand break at the recognition site. Thus, in certain embodiments, target sequences corresponding to 5′ and/or 3′ homology arms of a targeting vector are within at least one nucleotide of a given recognition site or are within at least 10 nucleotides to about 14 kb of a given recognition site. In some embodiments, a nuclease cleavage site is immediately adjacent to at least one, two, three, four, and/or more target sequences.

[0929] The spatial relationship of target sequences that correspond to homology arms of a targeting vector and a nuclease cleavage site can vary. For example, target sequences can be located 5′ to a nuclease cleavage site, target sequences can be located 3′ to a recognition site, or target sequences can flank a nuclease cleavage site.

[0930] Combined use of a targeting vector with a nuclease agent can result in an increased targeting efficiency compared to use of a targeting vector alone. For example, when a targeting vector is used in conjunction with a nuclease agent, targeting efficiency of a targeting vector can be increased by at least two-fold, at least three-fold, at least four-fold, at least five-fold, at least six-fold, at least seven-fold, at least eight-fold, at least nine-fold, at least ten-fold or within a range formed from these integers, such as 2-10-fold when compared to use of a targeting vector alone.

[0931] In some embodiments, targeting vectors comprise homology arms that correspond to and are derived from nucleic acid sequences larger than those typically used by other approaches intended to perform homologous recombination in cells. In some embodiments, targeting vectors comprise homology arms that correspond to and are derived from nucleic acid sequences shorter than those typically used by other approaches intended to perform homologous recombination in cells. In some embodiments, a homology arm is at least 10 kb in length, or the sum total of a 5′ homology arm and a 3′ homology arm can be, for example, at least 10 kb. In some embodiments, a homology arm is less than 10 kb in length, or the sum total of a 5′ homology arm and a 3′ homology arm can be, for example, is less than 10 kb. In some embodiments, targeting vectors comprising nucleic acid constructs larger than those typically used by other approaches intended to perform homologous recombination in cells. For example, in some embodiments, large loci that cannot traditionally be accommodated by plasmid-based targeting vectors because of their size limitations may still be employed through the use of large targeting vectors. For example, a targeted locus can be (i.e., 5′ and 3′ homology arms can correspond to) a locus of a cell that is not targetable using a conventional method or that can be targeted only incorrectly or only with significantly low efficiency in the absence of a nick or double-strand break induced by a nuclease agent (e.g., a Cas protein). In some embodiments, a large targeting vector may include vectors derived from bacterial artificial chromosome (BAC), a human artificial chromosome, or a yeast artificial chromosome (YAC). Large targeting vectors can be in linear form or in circular form. Examples of large targeting vectors and methods for making them are described, e.g., in Macdonald (2014), U.S. Pat. Nos. 6,586,251, 6,596,541 and 7,105,348; and International Patent Application Publication No. WO 2002/036789.

### Methods of Making Provided Non-Human Animals

[0932] Those skilled in the art appreciate that various technologies can be utilized to make engineered cells, issues, animals, etc. in accordance with the present disclosure. Provided herein are compositions and methods for making non-human animals (e.g., rodents, e.g., mice) whose germline genome comprises an engineered human HSD17B13 gene.

[0933] In some embodiments, the non-human HSD17B13 locus may be the site for insertion of a human HSD17B13 gene. In some embodiments, any suitable integration locus may be the site for insertion of a human HSD17B13 coding sequence.

[0934] In some embodiments, a human HSD17B13 gene may be under the control of a heterologous protein enhancer(s) and/or promoter(s). In some embodiments, methods described herein comprise inserting a single human HSD17B13 gene encoding a human HSD17B13 protein. In some embodiments, methods described herein comprise inserting more than one human HSD17B13 gene encoding more than one human HSD17B13 polypeptides.

[0935] Provided herein are compositions and methods for making non-human animals (e.g., rodents, e.g., mice) whose germline genome comprises an engineered non-human primate (NHP) HSD17B13 locus that includes one or more functional HSD17B13 domains (e.g., a lipid droplet targeting domain (comprising an N-terminal hydrophobic domain, PAT-like domain, and a putative a-helix/p-sheet/a-helix domain) and enzymatic activity domains (comprising catalytic sites, substrate binding sites, and homodimer interaction sites). In some embodiments, methods described herein comprise inserting transcriptionally independent portions of a NHP HSD17B13 protein which may be rejoined in vivo through the action of trans splice acceptors and/or donors.

[0936] In some embodiments, the non-human HSD17B13 locus may be the site for insertion of a NHP HSD17B13 gene. In some embodiments, any suitable integration locus may be the site for insertion of a NHP HSD17B13 coding sequence.

[0937] In some embodiments, a NHP HSD17B13 gene may be under the control of a heterologous protein enhancer(s) and/or promoter(s). In some embodiments, methods described herein comprise inserting a single NHP HSD17B13 gene encoding a NHP HSD17B13 protein. In some embodiments, methods described herein comprise inserting more than one NHP HSD17B13 gene encoding a NHP HSD17B13 polypeptide.

### Embryonic Stem Cell Modification for Creating Transgenic Animals

[0938] In some embodiments, methods of making a provided non-human animal include insertion of genetic material that comprises an exogenous HSD17B13 gene into an embryonic stem cell of a non-human animal (e.g., a rodent, e.g., a rat or mouse). In some embodiments, methods include multiple insertions in a single ES cell clone. In some embodiments, methods include sequential insertions made in a successive ES cell clones. In some embodiments, methods include a single insertion made in an engineered ES cell clone.

[0939] In some embodiments, methods of making a non-human transgenic animal involving the use of an embryonic stem cell can have a targeting vector and/or nucleic acid construct introduced through any manner known in the art. In some embodiments, a transgene is introduced to an embryonic stem cell through a method comprising but not limited to: electroporation, lipid based transfection, lipid based nanoparticles, retroviral infection, and/or lentiviral infection.

[0940] In some embodiments of a method of making a non-human animal (e.g., rodent, e.g., mouse), a DNA fragment is introduced into a non-human embryonic stem cell.

[0941] In some embodiments, methods comprising the use of embryonic stem cell modification for the creation of transgenic animals may utilize any molecular biology technique or reagent described herein.

[0942] In some embodiments, a targeting vector comprising an HSD17B13 coding sequence is electroporated into mouse ES cells, using methods known in the art. Screening and/or selection for clones that have undergone homologous recombination yields modified ES cells for generating chimeric mice that express huHSD17B13 1. Positive ES cell clones are confirmed by PCR screening using primers and probes specific for the huHSD17B13 transgene. Primers and probes vary dependent upon the insertion loci of interest. Targeted ES cells are used as donor ES cells and introduced into an 8-cell stage mouse embryo using an appropriate method (e.g., by the VELOCIMOUSE® method (see, e.g., U.S. Pat. No. 7,294,754 and Poueymirou et al. (2007). F0 generation mice that are essentially fully derived from the donor gene-targeted ES cells allowing immediate phenotypic analyses, Nature Biotech. 25(1): 91-99). Transgenic mice expressing huHSD17B13 are identified by genotyping using methods known in the art. Mice are bred to stable heterozygotic and/or homozygotic transgenic transmission of a huHSD17B13 insertion locus.

### Zygotic Injection for Creating Transgenic Animals

[0943] Where appropriate, an exogenous HSD17B13 gene (e.g., a human HSD17B13 gene encoding a human HSD17B13 protein) may separately be modified to include codons that are optimized for expression in a non-human animal (e.g., see U.S. Pat. Nos. 5,670,356 and 5,874,304). Codon optimized sequences are engineered sequences, and preferably encode the identical polypeptide (or a biologically active fragment of a characteristic portion of the polypeptide which has substantially the same activity as the full-length polypeptide) encoded by the non-codon optimized parent polynucleotide. In some embodiments, an exogenous HSD17B13 gene encoding an exogenous HSD17B13 protein may separately include an altered sequence to optimize codon usage for a particular cell type (e.g., a rodent cell, e.g., a mouse cell). For example, the codons of each nucleotide sequence to be inserted into the genome of a non-human animal as described herein (e.g., a rodent, e.g., mouse) may be optimized for expression in a cell of the non-human animal. Such a sequence may be described as a codon-optimized sequence.

[0944] In some embodiments, insertion of nucleotide sequences encoding an exogenous HSD17B13 gene employs a minimal amount of modification of the germline genome of a non-human animal as described herein and results in expression of an exogenous HSD17B13 gene (e.g., a human HSD17B13 gene or a NHP HSD17B13 gene). Methods for generating engineered non-human animals (e.g., rodents, e.g., rats or mice), including knockouts and knock-ins, are known in the art (see, e.g., Gene Targeting: A Practical Approach, Joyner, ed., Oxford University Press, Inc., 2000). For example, generation of genetically engineered rodents may optionally involve disruption of the genetic loci of one or more endogenous rodent genes (or gene segments) and introduction of one or more heterologous genes (or gene segments or nucleotide sequences) into the rodent genome, in some embodiments, at the same location as an endogenous rodent gene (or gene segments). In some embodiments, nucleotide sequences encoding an exogenous HSD17B13 gene (e.g., a human HSD17B13 gene or a NHP HSD17B13 gene) is randomly inserted in the germline genome of a rodent. In some embodiments, nucleotide sequences encoding an exogenous HSD17B13 gene are introduced upstream of a non-human (e.g., rodent, e.g., rat or mouse) HSD17B13 locus in the germline genome of a rodent; in some certain embodiments, an endogenous HSD17B13 locus is altered, modified, or engineered to contain human and/or NHP HSD17B13 gene segments, wherein any combination of HSD17B13 gene segments derived from rodent, human, and/or NHP may be utilized.

[0945] Once produced, a targeting vector can be linearized injected into a rodent zygote or alternatively electroporated into rodent embryonic stem (ES) cells to create a rodent whose germline genome comprises the exogenous HSD17B13 gene. In some embodiments, confirmation of rodent ES cells comprising a targeting vector comprising an exogenous HSD17B13 gene can be selected and/or screened for using methods known in the art. As described in the examples section below, rodent zygotes comprising an injected nucleic acid construct comprising a targeting vector comprising an exogenous HSD17B13 gene can be utilized for creating transgenic non-human animals comprising an integrated exogenous HSD17B13 gene, such animals can be screened for from a population of viable injected zygotes which have been transplanted into a surrogate mother.

[0946] In some embodiments, a targeting vector is introduced into non-human (e.g., rodent, e.g., mouse or rat) embryonic cells (e.g., zygotes and/or stem cells) by electroporation so that the sequence contained in the targeting vector results in the capacity of a non-human (e.g., rodent, e.g., rat or mouse) cell or non-human animal (e.g., a rodent, e.g., rat or mouse) to expresses an exogenous HSD17B13 gene. As described herein, a genetically engineered non-human animal is generated where an exogenous HSD17B13 gene has been created and/or incorporated into the germline genome of the non-human animal (e.g., at a defined locus, and/or at a random locus). In some embodiments, insertion and/or expression of an exogenous HSD17B13 gene is confirmed using methods known in the art (e.g., PCR, western blotting etc.) In some embodiments, oligonucleotides as described herein are then characterized in vitro or in vivo using tissues, cells, and/or animals derived from a non-human embryonic stem cell comprising an exogenous HSD17B13 gene.

[0947] In some embodiments, a method of making a genetically modified non-human animal (e.g., rodent, e.g., mouse) comprises engineering a human HSD17B13 gene in the germline genome of the non-human animal to comprise a sequence operably linked to a tissue specific regulatory region.

[0948] In some embodiments, a method of making a genetically modified non-human animal (e.g., rodent, e.g., mouse) comprises engineering a human HSD17B13 gene in the germline genome of the non-human animal to comprise a sequence operably linked to a temporally specific regulatory region.

[0949] In some embodiments, a method of making a genetically modified non-human animal (e.g., rodent, e.g., mouse) comprises engineering a human HSD17B13 gene in the germline genome of the non-human animal to comprise a sequence operably linked to a substrate specific regulatory region.

[0950] In some embodiments, a non-human animal (e.g., rodent, e.g., rat or mouse) made, generated, produced, obtained or obtainable from a method as described herein is provided. In some embodiments of a method of making a non-human animal (e.g., rodent, e.g., rat or mouse), a DNA fragment is introduced into a non-human embryonic stem cell and/or zygote whose germline genome comprises an endogenous HSD17B13 loci. Alternatively, and/or additionally, in some embodiments, the germline genome of a non-human animal (e.g., rodent, e.g., rat or mouse) as described herein further comprises a deleted, inactivated, functionally silenced or otherwise non-functional endogenous HSD17B13 locus. Genetic modifications to delete or render non-functional a gene or genetic locus may be achieved using methods described herein and/or methods known in the art.

[0951] A genetically engineered founder non-human animal (e.g., rodent, e.g., rat or mouse) can be identified based upon the presence of an exogenous HSD17B13 gene as described herein in its germline genome and/or expression of exogenous HSD17B13 protein in tissues or cells of the non-human animal. A genetically engineered founder non-human animal can then be used to breed additional non-human animals carrying an exogenous HSD17B13 gene, thereby creating a cohort of non-human animals each carrying one or more copies of an exogenous HSD17B13 gene. Moreover, genetically engineered non-human animals carrying an exogenous HSD17B13 gene can further be bred to other genetically engineered non-human animals carrying other transgenes (e.g., human disease genes) or other mutated endogenous loci as desired.

[0952] Genetically engineered non-human animals (e.g., rodents, e.g., rats or mice) may also be produced to contain selected systems that allow for regulated, directed, inducible and/or cell-type specific expression of a transgene or integrated sequence(s). For example, non-human animals as described herein may be engineered to contain one or more sequences encoding an exogenous HSD17B13 gene that is/are conditionally expressed (e.g., reviewed in Rajewski, K. et al., 1996, J. Clin. Invest. 98(3):600-3). Exemplary systems include the Cre/loxP recombinase system of bacteriophage P1 (see, e.g., Lakso, M. et al., 1992, Proc. Natl. Acad. Sci. U.S.A. 89:6232-6) and the FLP/Frt recombinase system of S. cerevisiae (O'Gorman, S. et al, 1991, Science 251:1351-5). Such animals can be provided through the construction of “double” genetically engineered animals, e.g., by mating two genetically engineered animals, one containing a transgene comprising a selected modification (e.g., an exogenous HSD17B13 gene as described herein) and the other containing a transgene encoding a recombinase (e.g., a Cre recombinase).

Non-human Animals Amenable to Exogenous HSD17B13 gene Expression

[0953] Non-human animals (e.g., rodents, e.g., rats or mice) as described herein may be prepared as described above, or using methods known in the art, to comprise additional human, humanized or otherwise engineered genes, oftentimes depending on the intended use of the non-human animal. Genetic material of such human, humanized or otherwise engineered genes may be introduced through the further alteration of the genome of cells (e.g., embryonic stem cells, and/or injection of zygotes derived from transgenic rodents comprising an exogenous HSD17B13 gene)having the genetic modifications or alterations as described above or through breeding techniques known in the art with other genetically modified or engineered strains as desired.

[0954] As those skilled in the art appreciate, various compatible mouse strains (e.g., WT, harboring one or more transgenes, containing one or more mutations in an endogenous loci, etc.), can be bred to any one of the engineered mice described herein to create any number of genetically modified mouse strains expressing an HSD17B13 (e.g., a NHP HSD17B13, a human HSD17B13, etc.) polypeptide or a characteristic portion thereof and any additional genetic features (e.g., natural mouse mutant loci, disease modelling endogenous mouse gene mutant loci, transgenically derived mutant animals expressing a human gene mutation of interest, etc.). Various technologies can be utilized to generate mice heterozygous or homozygous for a transgenic polynucleotide encoding an HSD17B13 polypeptide or a characteristic portion thereof as described herein (e.g., human HSD17B13). In some embodiments, genetically modified mice which are homozygous or heterozygous for huHSD17B13 (e.g., those described in the Examples) are bred to mice homozygous or heterozygous for a mutation (deletion, gain of function, loss of function, etc.) of an endogenous mouse gene of interest that may be associated with HSD17B13 function. Resultant progeny expressing desired HSD17B13 or characteristic portions thereof and heterozygous for a gene of interest are crossed to obtain mice homozygous and/or heterozygous for HSD17B13 and/or the gene of interest. In some embodiments, breeding may be performed by a commercial breeder (e.g., The Jackson Laboratory). In certain embodiments, mice heterozygous for a transgenic HSD17B13 insertion (e.g., as described herein) are crossed to a balancer line to maintain stable heterozygotic transgenic HSD17B13 transmission. In some embodiments, a closely linked phenotypically detectable marker is genetically engineered into transgenic HSD17B13 mice to aid with crossing and/or genotyping.

[0955] Although embodiments describing the construction of an exogenous HSD17B13 gene in a mouse (i.e., a mouse with an exogenous HSD17B13 gene integrated into its germline genome) are extensively discussed herein, other non-human animals that comprise an exogenous HSD17B13 gene are also provided. Such non-human animals include any of those which can be genetically modified to express exogenous HSD17B13 polypeptides and/or fragments thereof as described herein, including, e.g., mammals, e.g., mouse, rat, rabbit, pig, bovine (e.g., cow, bull, buffalo), deer, sheep, goat, chicken, cat, dog, ferret, primate (e.g., marmoset, rhesus monkey), etc. For example, for those non-human animals for which suitable genetically modifiable ES cells are not readily available, other methods are employed to make a non-human animal comprising the genetic modification. Such methods include, e.g., modifying a non-ES cell genome (e.g., a fibroblast or an induced pluripotent cell) and employing somatic cell nuclear transfer (SCNT) to transfer the genetically modified genome to a suitable cell, e.g., an enucleated oocyte, and gestating the modified cell (e.g., the modified oocyte) in a non-human animal under suitable conditions to form an embryo.

[0956] Methods for modifying the germline genome of a non-human animal (e.g., a pig, cow, rodent, chicken, etc. genome) include, e.g., employing a zinc finger nuclease (ZFN), a transcription activator-like effector nuclease (TALEN), or a Cas protein (i.e., a CRISPR/Cas system) to include an exogenous HSD17B13 gene. Guidance for methods for modifying the germline genome of a non-human animal can be found in, e.g., U.S. Pat. No. 9,738,897, and U.S. Patent Application Publication Nos. US 2016/0145646 (published May 26, 2016) and US 2016/0177339 (published Jun. 23, 2016).

[0957] In some embodiments, a non-human animal as described herein is a mammal. In some embodiments, a non-human animal as described herein is a small mammal, e.g., of the superfamily Dipodoidea or Muroidea. In some embodiments, a genetically modified animal as described herein is a rodent. In some embodiments, a rodent as described herein is selected from a mouse, a rat, and a hamster. In some embodiments, a rodent as described herein is selected from the superfamily Muroidea. In some embodiments, a genetically modified animal as described herein is from a family selected from Calomyscidae (e.g., mouse-like hamsters), Cricetidae (e.g., hamster, New World rats and mice, voles), Muridae (true mice and rats, gerbils, spiny mice, crested rats), Nesomyidae (climbing mice, rock mice, white-tailed rats, Malagasy rats and mice), Platacanthomyidae (e.g., spiny dormice), and Spalacidae (e.g., mole rates, bamboo rats, and zokors). In some certain embodiments, a genetically modified rodent as described herein is selected from a true mouse or rat (family Muridae), a gerbil, a spiny mouse, and a crested rat. In some certain embodiments, a genetically modified mouse as described herein is from a member of the family Muridae. In some embodiment, a non-human animal as described herein is a rodent. In some certain embodiments, a rodent as described herein is selected from a mouse and a rat. In some embodiments, a non-human animal as described herein is a mouse.

[0958] In some embodiments, a non-human animal as described herein is a rodent that is a mouse of a C57BL strain selected from C57BL/A, C57BL/An, C57BL/GrFa, C57BL/KaLwN, C57BL/6, C57BL/6J, C57BL/6ByJ, C57BL/6NJ, C57BL/10, C57BL/10ScSn, C57BL/L10Cr, and C57BL/Ola. In some certain embodiments, a mouse as described herein is a 129-strain selected from the group consisting of a strain that is 129P1, 129P2, 129P3, 129X1, 129S1 (e.g., 129S1/SV, 129S1/SvIm), 12952, 12954, 129S5, 129S9/SvEvH, 129/SvJae, 129S6 (129/SvEvTac), 129S7, 12958, 129T1, 129T2 (see, e.g., Festing et al., 1999, Mammalian Genome 10:836; Auerbach, W. et al., 2000, Biotechniques 29(5):1024−1028, 1030, 1032). In some certain embodiments, a genetically modified mouse as described herein is a mix of an aforementioned 129 strain and an aforementioned C57BL/6 strain. In some certain embodiments, a mouse as described herein is a mix of aforementioned 129 strains, or a mix of aforementioned BL/6 strains. In some certain embodiments, a 129 strain of the mix as described herein is a 129S6 (129/SvEvTac) strain. In some embodiments, a mouse as described herein is a BALB strain, e.g., BALB/c strain. In some embodiments, a mouse as described herein is a mix of a BALB strain and another aforementioned strain.

[0959] In some embodiments, a non-human animal as described herein is a rat. In some certain embodiments, a rat as described herein is selected from a Wistar rat, an LEA strain, a Sprague Dawley strain, a Fischer strain, F344, F6, and Dark Agouti. In some certain embodiments, a rat strain as described herein is a mix of two or more strains selected from the group consisting of Wistar, LEA, Sprague Dawley, Fischer, F344, F6, and Dark Agouti.

[0960] A rat pluripotent and/or totipotent cell can be from any rat strain, including, for example, an ACI rat strain (an inbred strain originally derived from August and Copenhagen strains), a Dark Agouti (DA) rat strain, a Wistar rat strain, a LEA rat strain, a Sprague Dawley (SD) rat strain, or a Fischer rat strain such as Fisher F344 or Fisher F6. Rat pluripotent and/or totipotent cells can also be obtained from a strain derived from a mix of two or more strains recited above. For example, the rat pluripotent and/or totipotent cell can be from a DA strain or an ACI strain. The ACI rat strain is characterized as having black agouti, with white belly and feet and an RTlav1 haplotype. Such strains are available from a variety of sources including Harlan Laboratories. An example of a rat ES cell line from an ACI rat is an ACI.G1 rat ES cell. The DA rat strain is characterized as having an agouti coat and an RTlav1 haplotype. Such rats are available from a variety of sources including Charles River and Harlan Laboratories. Examples of a rat ES cell line from a DA rat are the DA.2B rat ES cell line and the DA.2C rat ES cell line. In some embodiments, the rat pluripotent and/or totipotent cells are from an inbred rat strain (see, e.g., U.S. Patent Application Publication No. 2014-0235933 A1). Guidance for making modifications in a rat genome (e.g., in a rat ES cell) using methods and/or constructs as described herein can be found in, e.g., in U.S. Patent Application Publication Nos. 2014-0310828 and 2017-0204430.

[0961] In some embodiments, useful technologies are described in, e.g., U.S. Ser. No. 10/314,297 and can be utilized in accordance with the present disclosure. As those skilled in the art appreciate, many useful technologies are commercially available from various venders and/or service providers.

[0962] In some embodiments, the present disclosure provides methods for assessing an agent, e.g., an oligonucleotide, or a composition thereof, comprising administering to an animal, cell or tissue described herein the agent or composition. In some embodiments, an agent or composition is assessed for preventing or treating a condition, disorder or disease. In some embodiments, animals, cells, tissues, e.g., as described in various embodiments herein, are animal models, or cells or tissues, for various conditions, disorders or diseases (e.g., comprising mutations associated with various conditions, disorders or diseases, and/or cells, tissues, organs, etc., associated with or of various conditions, disorders or diseases) that are engineered to comprise and/or express a polynucleotide whose sequence encodes an HSD17B13 polypeptide or a characteristic portion thereof. In some embodiments, animals may be provided by breeding (e.g., IVF, natural breeding, etc.) an animal that are model animals for various conditions, disorders or diseases but are not engineered to comprise and/or express a polynucleotide whose sequence encodes an HSD17B13 polypeptide or a characteristic portion thereof with animals that are engineered to comprise and/or express a polynucleotide whose sequence encodes an HSD17B13 polypeptide or a characteristic portion thereof. In some embodiments, cells or tissues may be provided by introducing into cells or tissues a polynucleotide whose sequence encodes an HSD17B13 polypeptide or a characteristic portion thereof. In some embodiments, the present disclosure provides a method for preventing or treating a condition, disorder or disease, comprising administering to a subject an effective amount of an agent or a compositions thereof, wherein the agent or composition is assessed in an animal provided herein (e.g., an animal engineered to comprise an HSD17B13 polypeptide or a characteristic portion thereof, an animal engineered to comprise and/or express a polynucleotide whose sequence encodes an HSD17B13 polypeptide or a characteristic portion thereof, a model animal for a condition, disorder or disease which is engineered to comprise an HSD17B13 polypeptide or a characteristic portion thereof, a model animal for a condition, disorder or disease engineered to comprise and/or express a polynucleotide whose sequence encodes an HSD17B13 polypeptide or a characteristic portion thereof). In some embodiments, the present disclosure provides a method for preventing or treating a condition, disorder or disease, comprising administering to a subject an effective amount of an agent or a compositions thereof, wherein the agent or composition is assessed in a cell or tissue provided herein. In some embodiments, an animal is a non-human animal. In some embodiments, cells are non-human animal cells. In some embodiments, tissues are non-human animal tissues. In some embodiments, a non-human animal is a rodent. In some embodiments, a non-human animal is a mouse. In some embodiments, a non-human animal is a rat. In some embodiments, a non-human animal is a non-human primate.

[0963] As appreciated by those skilled in the art, in some embodiments, animals can be heterozygous with respect to one or more or all sequences. In some embodiments, animals are homozygous with respect to one or more or all sequences. In some embodiments, animals are hemizygous with respect to one or more or all engineered sequences. In some embodiments, animals are homozygous with respect to one or more sequences, and heterozygous with respect to one or more sequences. In some embodiments, animals are heterozygous with respect to a polynucleotide whose sequence encodes an HSD17B13 polypeptide or a characteristic portion thereof. In some embodiments, animals are homozygous with respect to a polynucleotide whose sequence encodes an HSD17B13 polypeptide or a characteristic portion thereof. In some embodiments, animals are homozygous wild-type with respect to a loci encoding a polynucleotide whose sequence encodes an HSD17B13 polypeptide or a characteristic portion thereof (e.g., do not express an exogenous HSD17B13 polypeptide or a characteristic portion thereof), and may act as a relative control. In some embodiments, certain animals are heterozygous with respect to one or more polynucleotide sequences associated with various condition, disorder or diseases, and are heterozygous with respect to a polynucleotide whose sequence encodes an HSD17B13 polypeptide or a characteristic portion thereof. In some embodiments, certain animals are homozygous with respect to one or more polynucleotide sequences associated with various conditions, disorders, or diseases, and are heterozygous with respect to a polynucleotide whose sequence encodes an HSD17B13 polypeptide or a characteristic portion thereof. In some embodiments, certain animals are heterozygous with respect to one or more polynucleotide sequences associated with various conditions, disorders, or diseases, and are homozygous with respect to a polynucleotide whose sequence encodes an HSD17B13 polypeptide or a characteristic portion thereof. In some embodiments, certain animals are homozygous with respect to one or more polynucleotide sequences associated with various conditions, disorders, or diseases, and are homozygous with respect to a polynucleotide whose sequence encodes an HSD17B13 polypeptide or a characteristic portion thereof. Cells or tissues may be similarly heterozygous, hemizygous and/or homozygous with respect to various sequences.

[0964] In some embodiments, the present disclosure provides methods comprising: 1) assessing an agent or a composition thereof, comprising contacting the agent or a composition thereof with a provided cell or tissue associated with or of a condition, disorder, or disease, and 2) administering to a subject suffering from or susceptible to a condition, disorder, or disease an effective amount of an agent or composition thereof. In some embodiments, the present disclosure provides methods comprising: 1) assessing an agent or a composition thereof, comprising administering the agent or a composition thereof to a provided animal which is an animal model of a condition, disorder, or disease, and 2) administering to a subject suffering from or susceptible to a condition, disorder, or disease an effective amount of an agent or composition thereof. In some embodiments, as described herein, a cell, tissue or animal is engineered to comprise an HSD17B13 polypeptide or a characteristic portion thereof. In some embodiments, a cell, tissue or animal is engineered to comprise and/or express a polynucleotide whose sequence encodes an HSD17B13 polypeptide or a characteristic portion thereof. In some embodiments, a cell, tissue or animal further comprises a nucleotide sequence (e.g., a mutation) associated with a condition, disorder, or disease. In some embodiments, an animal is a rodent, e.g., a mouse, a rat, etc. In some embodiments, a cell or tissue is of a rodent, e.g., a mouse, a rat, etc. In some embodiments, a cell is a germline cell. In some embodiments, a fraction of and not all cells, e.g., cells of particular cell types or tissues or location, of a population of cells, a tissue or an animal comprise a nucleotide sequence (e.g., a mutation) associated with a condition, disorder, or disease, and such fraction of cells are engineered to comprise an HSD17B13 polypeptide or a characteristic portion thereof or engineered to comprise and/or express a polynucleotide whose sequence encodes an HSD17B13 polypeptide or a characteristic portion thereof. Those skilled in the art appreciate that various technologies are available for optionally controlled introduction and/or expression of a nucleotide sequence in various cells, tissues, or organs and can be utilized in accordance with the present disclosure. In some embodiments, as described herein, a cell, tissue or animal comprises a polynucleotide whose sequence encodes an HSD17B13 polypeptide or a characteristic portion thereof in a genome, in some embodiments, in a germline genome. In some embodiments, as described herein, a cell, tissue or animal comprises a nucleotide sequence (e.g., a mutation) associated with a condition, disorder or disease in a genome, in some embodiments, in a germline genome.

### Methods of Using Provided Non-Human Animals, Cells or Tissues

[0965] Non-human animals (e.g., rodents, e.g., rats or mice), non-human (e.g., rodent, e.g., rat or mouse) cells and non-human (e.g., rodent, e.g., rat or mouse) tissues as described herein can be used as a platform for the development of therapeutic agents, e.g., oligonucleotides. In particular, non-human animals, non-human cells and non-human tissues as described herein represent a particularly advantageous platform for the identification and characterization of agents, e.g., ds oligonucleotides targeting HSD17B13 can be useful for treatment of conditions, disorders, or diseases associated with expression of HSD17B13, e.g., nonalcoholic fatty liver disease (NAFLD), nonalcoholic steatohepatitis (NASH), alcoholic steatohepatitis (ASH), alcoholic liver disease, nonalcoholic liver disease, alcoholic cirrhosis, nonalcoholic cirrhosis, steatohepatitis, hepatic steatosis, hepatoceullar carcinoma, HCV hepatitis, chronic hepatitis, hereditary hemochromatosis, primary sclerosing cholangitis, drug induced liver injury, or hepatocellular necrosis.

[0966] In some embodiments, the present disclosure provides that non-human animals (e.g., rodents, e.g., rats or mice), non-human (e.g., rodent, e.g., rat or mouse) cells and non-human (e.g., rodent, e.g., rat or mouse) tissues described herein can be used in methods characterizing/assessing various agents, e.g., ds oligonucleotides targeting HSD17B13 useful for treatment of conditions, disorders, or diseases associated with expression of HSD17B13. In some embodiments, a composition is an oligonucleotide composition. In some embodiments, oligonucleotides comprise various modifications, e.g., base, sugar, internucleotidic linkage modifications, etc. In some embodiments, linkage phosphorus in a modified internucleotidic linkage, e.g., a phosphorothioate internucleotidic linkage, is chiral (as appreciated by those skilled in the art, natural phosphate linkages commonly found in natural DNA and RNA molecules are achiral). In some embodiments, for various biological or therapeutic uses oligonucleotides comprise extensive modifications, and in some cases, contain no natural RNA sugars for, e.g., improved stability. In some embodiments, a composition is a stereorandom oligonucleotide composition. In some embodiments, a composition is a chirally controlled oligonucleotide composition, wherein one or more or all chiral linkage phosphorus are independently chirally controlled.

Utilizing Non-Human Animals for Agent Assessment In vivo

[0967] In some embodiments, non-human animals (e.g., rodents, e.g., rats or mice), non-human (e.g., rodent, e.g., rat or mouse) cells and non-human (e.g., rodent, e.g., rat or mouse) tissues as described herein may be employed for characterizing an oligonucleotide in vivo, wherein the expression of exogenous HSD17B13 gene in said non-human animal provides an improved characterization platform when compared to a WT non-human animal (e.g., rodents, e.g., rats or mice).

[0968] In some embodiments, a non-human animal (e.g., genetically modified rodent, e.g., genetically modified rat or mouse) as described herein is treated (e.g., injected) with a ds oligonucleotide of interest under conditions and for a time sufficient that the ds oligonucleotide can target the exogenous HSD17B13. Sequences of RNA molecules (e.g., HSD17B13 sequences) are isolated and/or identified from the treated non-human animal (or one or more cells, for example, one or more B cells) and characterized using various assays measuring, for example, affinity, specificity, editing levels, transcript stability, translational efficiency, protein binding partners, nuclear localization, etc. In various embodiments, oligonucleotides characterized using non-human animals, non-human cells and/or non-human tissues as described herein comprise one or more regions that facilitate targeting of an HSD17B13 target.

[0969] In some embodiments, a non-human animal (e.g., genetically modified rodent, e.g., genetically modified rat or mouse) as described herein is treated with a ds oligonucleotide of interest and the effects of said ds oligonucleotide in specific tissues are monitored and/or assessed.

[0970] In some embodiments, non-human (e.g., rodent, e.g., rat or mouse) cells as described herein comprising a transgenic HSD17B13 locus may be employed for methods of characterizing potentially therapeutically efficacious oligonucleotides, the method comprising characterization in cells derived from the HSD17B13 transgenic mouse. In some embodiments, such cells may be of any cell lineage and/or type of interest known in the art. In some embodiments, such cells may be but are not limited to: primary mouse hepatocytes, epidermal cells, epithelial cells, cortical neurons, sensory neurons, effector neurons, hormone-secreting cells, exocrine secretory epithelial cells, barrier cells, cardiomyocytes, leukocytes, lymphocytes, B cells, T cells, Bone Marrow cells, osteoblasts, chondrocytes, chondroblasts, adipocytes, cardiac muscle cells, muscle cells, fibroblasts, germ cells, nurse cells, kidney cells and/or an induced stem cell or product thereof derived from any of the aforementioned cells.

[0971] Non-human animals (e.g., rodents, e.g., rats or mice), non-human (e.g., rodent, e.g., rat or mouse) cells and non-human (e.g., rodent, e.g., rat or mouse) tissues as described herein can be employed for identifying ds oligonucleotides targeting HSD17B13, which can be useful for treatment of conditions, disorders, or diseases associated with expression of HSD17B13, e.g., nonalcoholic fatty liver disease (NAFLD), nonalcoholic steatohepatitis (NASH), alcoholic steatohepatitis (ASH), alcoholic liver disease, nonalcoholic liver disease, alcoholic cirrhosis, nonalcoholic cirrhosis, steatohepatitis, hepatic steatosis, hepatoceullar carcinoma, HCV hepatitis, chronic hepatitis, hereditary hemochromatosis, primary sclerosing cholangitis, drug induced liver injury, or hepatocellular necrosis.

[0972] Non-human animals (e.g., rodents, e.g., rats or mice), non-human (e.g., rodent, e.g., rat or mouse) cells and non-human (e.g., rodent, e.g., rat or mouse) tissues as described herein provide an improved in vivo system and source of biological materials (e.g., cells, nucleotides, polypeptides, protein complexes) for producing and characterizing oligonucleotides and/or polynucleotides that are useful for a variety of assays. In various embodiments, non-human animals, non-human cells and non-human tissues as described herein are used to develop therapeutics that target an RNA of interest (e.g., a RNA molecule known to function in a disease associated pathway) and/or modulate one or more activities associated with said RNA molecules of interest and/or modulate interactions of said RNA molecule of interest with other potential binding partners (e.g., any regulatory machinery that can act on intracellular RNA molecules, e.g., proteins and/or RNA species involved in translation, proteins and/or RNA species involved in innate immunity, proteins and/or RNA species involved in RNA interference, etc.).

[0973] In various embodiments, non-human animals (e.g., rodents, e.g., rats or mice), non-human (e.g., rodent, e.g., rat or mouse) cells and non-human (e.g., rodent, e.g., rat or mouse) tissues as described herein are used to determine the pharmacokinetic profiles of one or more ds oligonucleotide candidates. In various embodiments, one or more non-human animals, non-human cells and non-human tissues as described herein and one or more control or reference non-human animals, non-human cells and non-human tissues are each exposed to one or more agents, e.g., ds oligonucleotides at various doses (e.g., less than 0.1 mg/kg, 0.1 mg/kg, 0.2 mg/kg, 0.3 mg/kg, 0.4 mg/kg, 0.5 mg/kg, 1 mg/kg, 2 mg/kg, 3 mg/kg, 4 mg/kg, 5 mg/mg, 7.5 mg/kg, 10 mg/kg, 15 mg/kg, 20 mg/kg, 25 mg/kg, 30 mg/kg, 40 mg/kg, or 50 mg/kg or more). In some embodiments, oligonucleotides may be dosed to non-human animals at rates that vary as a function of gender, for example, in some embodiments a male animal may receive a higher dose than a comparable female animal, while in other embodiments, a female animal may receive a higher dose than a comparable male animal. In some embodiments, candidate therapeutic oligonucleotides may be dosed to non-human animals as described herein via any desired route of administration including parenteral and non-parenteral routes of administration. Parenteral routes include, e.g., intravenous, intra-arterial, intraportal, intramuscular, subcutaneous, intraperitoneal, intraspinal, intrathecal, intracerebroventricular, intracranial, intrapleural or other routes of injection. In some embodiments, administration may be non-parenteral, in some embodiments non-parenteral routes include, e.g., oral, nasal, transdermal, pulmonary, rectal, buccal, vaginal, ocular. In some embodiments, administration may also be by continuous infusion, local administration, sustained release from implants (gels, membranes or the like), and/or intravenous injection. In some embodiments, biological tissue (e.g., organs, blood, cells, secretions etc.) is isolated from non-human animals (humanized and control) at various time points (e.g., 0 hr, 6 hr, 1 day, 2 days, 3 days, 4 days, 5 days, 6 days, 7 days, 8 days, 9 days, 10 days, 11 days, or up to 30 or more days). Various assays may be performed to determine the pharmacokinetic profiles of administered candidate therapeutic oligonucleotides using samples obtained from non-human animals, non-human cells and non-human tissues as described herein including, but not limited to, editing levels, transcript levels, translational levels etc.

[0974] In various embodiments, non-human animals (e.g., rodents, e.g., rats or mice), non-human (e.g., rodent, e.g., rat or mouse) cells and non-human (e.g., rodent, e.g., rat or mouse) tissues as described herein are used to measure the therapeutic effect of blocking or modulating the activity of an RNA molecule of interest and the effect on gene expression as a result of cellular changes thereof.

[0975] Cells from provided non-human animals (e.g., rodents, e.g., rats or mice) can be isolated and used on an ad hoc basis, or can be maintained in culture for many generations. In various embodiments, cells from a provided non-human animal are immortalized (e.g., via use of a virus) and maintained in culture indefinitely (e.g., in serial cultures).

[0976] In some embodiments, a non-human (e.g., rodent, e.g., rat or mouse) cell is a non-human lymphocyte. In some embodiments, a non-human cell is selected from a B cell, dendritic cell, macrophage, monocyte and a T cell. In some embodiments, a non-human cell is an immature B cell, a mature naïve B cell, an activated B cell, a memory B cell, and/or a plasma cell.

[0977] In some embodiments, a non-human (e.g., rodent, e.g., rat or mouse) cell is a non-human embryonic stem (ES) cell. In some embodiments, a non-human ES cell is a rodent ES cell. In some certain embodiments, a rodent ES cell is a mouse ES cell and is from a 129 strain, C57BL strain, BALB/c or a mixture thereof. In some certain embodiments, a rodent embryonic stem cell is a mouse embryonic stem cell and is a mixture of 129 and C57BL strains. In some certain embodiments, a rodent embryonic stem cell is a mouse embryonic stem cell and is a mixture of 129, C57BL and BALB/c strains.

[0978] In some embodiments, use of a non-human (e.g., rodent, e.g., rat or mouse) ES cell as described herein to make a non-human animal is provided. In some certain embodiments, a non-human ES cell is a mouse ES cell and is used to make a mouse comprising exogenous HSD17B13 as described herein. In some certain embodiments, a non-human ES cell is a rat ES cell and is used to make a rat comprising exogenous HSD17B13 as described herein. In some embodiments, a non-human (e.g., rodent, e.g., rat or mouse) tissue is selected from but not limited to adipose, bladder, brain, breast, bone marrow, eye, heart, intestine, kidney, liver, lung, lymph node, muscle, pancreas, plasma, serum, skin, spleen, stomach, thymus, testis, ovum, and/or a combination thereof.

[0979] In some embodiments, an immortalized cell made, generated, produced or obtained from an isolated non-human cell or tissue as described herein is provided.

[0980] In some embodiments, a non-human (e.g., rodent, e.g., rat or mouse) embryo made, generated, produced, or obtained from a non-human ES cell as described herein is provided. In some certain embodiments, a non-human embryo is a rodent embryo; in some embodiments, a mouse embryo; in some embodiments, a rat embryo.

[0981] In some embodiments, a non-human animal (e.g., rodent, e.g., rat or mouse), non-human (e.g., rodent, e.g., rat or mouse) cell or non-human (e.g., rodent, e.g., rat or mouse) tissue as described herein is provided for use in the manufacture and/or development of a drug (e.g., a ds oligonucleotide or fragment thereof) for therapy or diagnosis.

[0982] In some embodiments, a non-human animal (e.g., rodent, e.g., rat or mouse), non-human (e.g., rodent, e.g., rat or mouse) cell or non-human (e.g., rodent, e.g., rat or mouse) tissue as described herein is provided for use in the manufacture and/or development of a medicament for the treatment, prevention or amelioration of a disease, disorder or condition. In some embodiments, use of a non-human animal (e.g., rodent, e.g., rat or mouse), non-human (e.g., rodent, e.g., rat or mouse) cell or non-human (e.g., rodent, e.g., rat or mouse) tissue as described herein in the manufacture and/or development of a drug or vaccine for use in medicine, such as use as a medicament, is provided.

### Kits

[0983] The present disclosure further provides a pack or kit comprising one or more containers filled with at least non-human cell, protein (single or complex (e.g., an antibody or fragment thereof)), DNA fragment, targeting vector, or any combination thereof, as described herein. Kits may be used in any applicable method (e.g., a research method). Optionally associated with such container(s) can be a notice in the form prescribed by a governmental agency regulating the manufacture, use or sale of pharmaceuticals or biological products, which notice reflects (a) approval by the agency of manufacture, use or sale for human administration, (b) directions for use, and/or (c) a contract that governs the transfer of materials and/or biological products (e.g., a non-human animal or non-human cell as described herein) between two or more entities and combinations thereof.

[0984] In some embodiments, a kit comprising a non-human cell, non-human tissue, immortalized cell, non-human ES cell, or non-human embryo as described herein is provided. In some embodiments, a kit comprising an amino acid from a non-human animal, non-human cell, non-human tissue, immortalized cell, non-human ES cell, or non-human embryo as described herein is provided. In some embodiments, a kit comprising a nucleic acid (e.g., a nucleic acid encoding a human HSD17B13 sequence described herein) from a non-human animal, non-human cell, non-human tissue, immortalized cell, non-human ES cell, or non-human embryo as described herein is provided. In some embodiments, a kit comprising a sequence (amino acid and/or nucleic acid sequence) identified from a non-human animal, non-human cell, non-human tissue, immortalized cell, non-human ES cell, or non-human embryo as described herein is provided.

[0985] In some embodiments, a kit as described herein for use in the manufacture and/or development of a drug (e.g., an oligonucleotide) for therapy or diagnosis is provided.

[0986] In some embodiments, a kit as described herein for use in the manufacture and/or development of a drug (e.g., an oligonucleotide) for the treatment, prevention or amelioration of a disease, disorder or condition is provided.

[0987] Other features of certain embodiments will become apparent in the course of the following descriptions of exemplary embodiments, which are given for illustration and are not intended to be limiting thereof.

### EXEMPLIFICATION

[0988] Certain examples of provided technologies (compounds (oligonucleotides, reagents, etc.), compositions, methods (methods of preparation, use, assessment, etc.), etc.) were described below.

### Example 1. Oligonucleotide Synthesis

[0989] Various technologies for preparing oligonucleotides and oligonucleotide compositions (both stereorandom and chirally controlled) are known and can be utilized in accordance with the present disclosure, including, for example, those in U.S. Pat. Nos. 9,394,333, 9,744,183, 9,605,019, 9,598,458, 9,982,257, U.S. Ser. No. 10/160,969, U.S. Ser. No. 10/479,995, US 2020/0056173, US 2018/0216107, US 2019/0127733, U.S. Ser. No. 10/450,568, US 2019/0077817, US 2019/0249173, US 2019/0375774, WO 2018/223056, WO 2018/223073, WO 2018/223081, WO 2018/237194, WO 2019/032607, WO 2019/055951, WO 2019/075357, WO 2019/200185, WO 2019/217784, WO 2019/032612, and/or WO 2020/191252, the methods and reagents of each of which are incorporated herein by reference.

### Abbreviations

[0990] 1λ reagent: TEA-3HF:TEA:H2O: DMSO=5.0:1.8:15.5:77.7 (v/v/v/v)
[0991] ADIH: 2-azido-1,3-dimethylimidazolium hexafluorophosphate
[0992] CMIMT: N-cyanomethylimidazolium triflate
[0993] CPG: controlled pore glass
[0994] DCM: dichloromethane, CH2Cl2
[0995] DIPEA: diisopropylethylamine
[0996] DMSO: dimethylsulfoxide
[0997] DMTr: 4,4′-dimethoxytrityl
[0998] GalNAc: N-acetylgalactosamine
[0999] HF: hydrogen fluoride
[1000] HATU: 1-[bis(dimethylamino)methylene]-1H-1,2,3-triazolo[4,5-b]pyridinium 3-oxide hexafluorophosphate
[1001] IBN: isobutyronitrile
[1002] MeCN: acetonitrile
[1003] MeIm: N-methylimidazole
[1004] TCA: trichloroacetic acid
[1005] TEA: triethylamine
[1006] XH: xanthane hydride

[1007] The HSD17B13 sequences, both guide and passenger strands are stereodefined oligonucleotides, with a mixed PS/PO/PN backbone. Respective stereorandom sequences were synthesized as positive controls. The number of PS/PO/PN linkages varies from sequences to sequence. For synthesizing PO, PS and PN linkages different amidites and synthetic cycles are used. Example given, for synthesizing an oligonucleotide, defined number of phosphodiester (PO) linkage were formed by cyanoethyl protected amidite using oxidation step and stereorandom phosphorothioate (PS) linkage were formed by cyanoethyl protected amidite using sulfurization step. Defined number of chiral phosphorothioate (PS)(Sp and Rp linkages), formed by DPSE protected chiral amidites using sulfurization step and defined number of chiral phosphoroamidates (PN) (Sp and Rp) linkages formed by PSM chiral auxiliary amidites using imidation step. All the sequences carry various modifications, especially 2′-modifications including 2′-OMe and 2′-F-modified nucleotides. Passenger strand oligonucleotides have 5′-GalNAc modifications (tri-antennary GalNAc moiety) at 5′-end. For introduction of GalNAc moiety at 5′-end, sequences were synthesized by coupling with C-6 amino modifier as the last coupling cycle and after purification and desalting are conjugated with tri-antennary GalNAc to make respective conjugate. For example, WV-42597 was synthesized first and then conjugated to make WV-42589. The synthesis process is described in detail here.

| | |
|---|---|
| WV-42597 | Passenger sequence with 5′-amino linker |
| WV-42589 | GalNac-conjugate of WV-42597 |

Procedure for the synthesis of WV-42597:

[1008] Synthesis of WV-42597 was performed on AKTA OP100 synthesizer (GE healthcare) using a 3.5 cm diameter SS column on a 400 μmol scale using a CPG support (loading 72 μmol/g). The process consisted of five steps: detritylation, coupling, capping 1, oxidation/sulfurization/imidation and capping 2.

[1009] Detritylation step: detritylation was performed using 3% DCA in toluene with a UV watch command set at 436 nm. Following detritylation step, the CPG support was subjected to wash cycle using acetonitrile for 2CV.

[1010] Coupling step: DPSE and PSM chiral amidites were prepared at 0.2M conc. (in ACN or 20% IBN in ACN). The amidites were mixed in-line with CMIMT activator (0.5M in acetonitrile) at a ratio of 5.83 prior to addition to the column. The coupling mixture was recycled for 10 minutes to maximize the coupling efficiency followed by column wash with 2CV of ACN.

[1011] Cyanoethyl amidites were prepared at 0.2M conc. (in ACN or 20% IBN in ACN). The amidites were mixed in-line with ETT activator (0.5M in acetonitrile) at a ratio of 4.07 prior to addition to the column. The coupling mixture was recycled for 10 minutes to maximize the coupling efficiency followed by column wash with 2CV of ACN.

[1012] Cap 1 step: For stereodefined couplings, the column was then treated with Capping 1 solution (acetic anhydride, lutidine, ACN) for 1 CV in 2 minutes to acetylate the chiral auxiliary amine. Following this step, the column was washed with 1.5 CV of acetonitrile. For stereorandom coupling Cap 1 step was not performed.

### Sulfurization/Imidation/Oxidation Step:

[1013] Sulfurization was performed with 0.1 M xanthane hydride in pyridine/acetonitrile (1.2 equivalent) with a contact time of 6 minute followed by 2CV wash step.

[1014] Imidation step was performed with 0.3 M ADIH reagent in acetonitrile with 18 equivalent and 15 min contact time followed by 2CV wash step.

[1015] Oxidation step was performed using oxidation reagent (50 mM 12/pyridine-H2O (9:1, v/v) ) 3.5 eq. 2.5 minute followed by 2CV acetonitrile wash.

[1016] Capping 2 step: Capping 2 step was performed using Capping A and Capping B reagents mixed inline (1:1) followed by a 2 CV ACN wash.

### General Procedure for the C&D Conditions:

[1017] After completion of the synthesis, the CPG support was finally treated with 20% diethylamine/acetonitrile wash step for 5 column volume/15 mins to remove the cyanoethyl protecting groups exclusively from the phosphate backbone followed by ACN wash cycle. The CPG solid support was dried and transferred into pressure vessel.

[1018] The following cleavage and deprotection protocol is described for (WV-42597): The DPSE protecting groups on SERPINA1-1159 were removed by treating the oligo bound support with desilylation reagent at a ratio of per μmole support/100 μL desilylation reagent. The desilylation reagent was made by mixing DMSO:water:TEA:TEA.3HF in ratio of 7.33:1.47:0.7:0.5. The CPG support was incubated in presence with desilylation reagent for 3 hours at 27° C. in an incubator shaker. After that conc. Ammonia was added at a ratio of per μmole support/200 μL of conc. ammonia to remove PSM auxiliaries, the protecting groups on nucleobases and the oligonucleotide from the CPG support. The mixture was incubated and shaken for 24 hours at 37° C. The mixture was cooled and filtered using 0.2-0.45 micron filter and the CPG support was rinsed three times to collect all the desired material as filtrate. The filtrate containing crude oligonucleotide was analyzed by RP-UPLC and quantitation was done using a Nanodrop One Spectrophotometer (Thermo Scientific) and a yield of 110,000 OD/μmole was obtained.

[1019] Purification and desalting of WV-42597: The crude WV-42597 was loaded on to Waters AP-2 glass column (2.0 cm×20 cm) packed with Source 15Q (Cytiva). Purification was performed on an AKTA150 Pure (GE healthcare) using following buffers: (Buffer A: 20 mM NaOH, 20% Acetonitrile v/v) (Buffer B: 20 mM NaOH, 2.5M NaCl, 20% Acetonitrile v/v). Desired fractions with full length products in the range of 70-80% were pooled together. The pooled material was then desalted on a 2KD re-generated cellulose membrane followed by lyophilization to obtain SERPINA1-1159 as fluffy white cake ready for conjugation.

[1020] Synthesis of WV-42589:

[1021] Protocol for GalNAc conjugation:

[1022] Precursor material: WV-42597.01 (0.01 denoting the batch number)

[1023] Final conjugated material: WV-42589.01

| | Mol. | Equivalent to | |
|---|---|---|---|
| Oligonucleotide/Reagents | Wt. | oligonucleotide | mL |
| WV-42597 | 10050.80 | 1 | — |
| Tri-antennary GalNAc acid | 2006 | 1.8 | — |
| HATU | 382 | 1.4 | — |
| DIEA | 129 | 10 | — |
| Acetonitrile | | — | 4 |

Aqueous oligonucleotide solution

| | Conc. | Total | Total |
|---|---|---|---|
| Oligonucleotide/solvent | (mg/mL) | volume (mL) | mg |
| WV-42597 in WFI water | 50 | 8 | 400 |

[1024] The Tri-antennary GalNAc acid, HATU are weighed out in a 50 mL plastic tube and dissolved in anhydrous acetonitrile then DIEA was added into the tube. The resulting mixture was stirred for 10 min at 37° C. The lyophilized WV-42597 was reconstituted in water in a separate tube and the GalNAc mixture was added to the oligonucleotide solution and stirred for 60 min at 37° C. The reaction was monitored by RP-UPLC. Reaction was found to be complete in 1 h. The reaction mixture was concentrated under vacuum to remove the acetonitrile and the resultant GalNAc-conjugated oligonucleotide was treated with conc. ammonia for 2 h at 37° C. The formation of final product was confirmed by mass spectrometry and RP-UPLC. The conjugated material was purified by anion exchange chromatography and desalted using tangential flow filtration (TFF) to obtain the final product (Target mass: 8708.54; Observed mass: 8709.9).

### Example 2. Provided Oligonucleotides and Compositions can Effectively Knockdown HSD17B13 In Vitro

[1025] Various Double stranded oligonucleotides targeting HSD17B13 and compositions were designed, constructed, characterized and assessed. As appreciated by those skilled in the art, various technologies can be utilized to assess properties and/or activities of provided oligonucleotides and compositions thereof. Some of such technologies are described in this Example. Those skilled in the art appreciate that many other technologies can be readily utilized in accordance with the present disclosure. As demonstrated herein, double stranded oligonucleotides targeting HSD17B13 and compositions, among other things, can be highly active, e.g., in reducing levels of their target nucleic acids and proteins encoded thereby.

[1026] A number of siRNAs were tested in vitro in human or NHP primary hepatocytes at one or a range of concentrations. Example protocol for in vitro determination of siRNA activity: For determination of siRNAs activity, siRNAs at specific concentration were delivered to, either gymnotically or by transfection with lipofectamine, human or NHP primary hepatocytes plated at 96-well plates, with 10,000 (human) or 40,000 (NHP) cells/well. Following 48 hours treatment, total RNA was extracted using SV96 Total RNA Isolation kit (Promega). cDNA production from RNA samples were performed using High-Capacity cDNA Reverse Transcription kit (Thermo Fisher) following manufacturer's instructions and qPCR analysis performed in CFX System using iQ Multiplex Powermix (Bio-Rad). For human HSD17B13 mRNA, the following qPCR assay was utilized: Forward, 5′-CGAAGGGATTCCTTACCTCATC-3′; Reverse, 5′-CCAAGGCCTGAAGTTCTGAT-3′; Probe, 5′ATTGCCGCTGTTGGCTTTCACAG-3′. For NHP HSD17B13, the following qPCR assay was utilized: Thermo Fisher Mf02888851_ml. Human SFRS9 was used as normalizer (Forward, 5′-TGGAATATGCCCTGCGTAAA-3′; Reverse, 5′-TGGTGCTTCTCTCAGGATAAAC-3′, Probe, 5′-TGGATGACACCAAATTCCGCTCTCA-3′. mRNA knockdown levels were calculated as % mRNA remaining relative to mock treatment.

[1027] Table 2 shows % human HSD17B13 mRNA remaining (1 nM siRNA treatment by transfection) relative to human SFRS9 control. N=2. N.D.: Not determined.

TABLE 2

| | | 1 nM | | |
|---|---|---|---|---|
| | | % remaining mRNA | % remaining mRNA | |
| Guide | Passenger | (hHSD17B13/hSFRS9)-1 | (hHSD17B13/hSFRS9)-2 | Mean |
| WV-38227 | WV-38419 | 42.72 | 50.68 | 46.70 |
| WV-38228 | WV-38420 | 41.13 | 49.56 | 45.35 |
| WV-38229 | WV-38421 | 42.98 | 50.33 | 46.65 |
| WV-38230 | WV-38422 | 49.68 | 76.01 | 62.84 |
| WV-38231 | WV-38423 | 30.47 | 49.28 | 39.88 |
| WV-38232 | WV-38424 | 27.00 | 45.23 | 36.11 |
| WV-38233 | WV-38425 | 29.74 | 43.48 | 36.61 |
| WV-38234 | WV-38426 | 23.30 | 37.81 | 30.55 |
| WV-38235 | WV-38427 | 28.58 | 37.33 | 32.95 |
| WV-38236 | WV-38428 | 25.12 | 34.05 | 29.58 |
| WV-38237 | WV-38429 | 23.82 | 33.29 | 28.55 |
| WV-38238 | WV-38430 | 32.16 | 33.31 | 32.74 |
| WV-38239 | WV-38431 | 23.85 | 36.70 | 30.28 |
| WV-38240 | WV-38432 | N.D. | 27.72 | 27.72 |
| WV-38241 | WV-38433 | 21.91 | 32.85 | 27.38 |
| WV-38242 | WV-38434 | 14.66 | 34.29 | 24.48 |
| WV-38243 | WV-38435 | 25.81 | 26.50 | 26.15 |
| WV-38244 | WV-38436 | 31.66 | 30.02 | 30.84 |
| WV-38245 | WV-38437 | 30.53 | 43.80 | 37.17 |
| WV-38246 | WV-38438 | 25.63 | 29.07 | 27.35 |
| WV-38247 | WV-38439 | 28.35 | 34.75 | 31.55 |
| WV-38248 | WV-38440 | 27.64 | 34.98 | 31.31 |
| WV-38249 | WV-38441 | 19.98 | 28.55 | 24.27 |
| WV-38250 | WV-38442 | 18.41 | 28.33 | 23.37 |
| WV-38251 | WV-38443 | N.D. | 24.89 | 24.89 |
| WV-38252 | WV-38444 | 21.37 | 37.71 | 29.54 |
| WV-38253 | WV-38445 | 31.64 | 42.02 | 36.83 |
| WV-38254 | WV-38446 | 39.09 | 38.06 | 38.57 |
| WV-38255 | WV-38447 | 41.87 | 51.41 | 46.64 |
| WV-38256 | WV-38448 | 38.18 | 55.01 | 46.60 |
| WV-38257 | WV-38449 | 19.77 | 33.14 | 26.46 |
| WV-38258 | WV-38450 | 19.16 | 27.16 | 23.16 |
| WV-38259 | WV-38451 | 23.90 | 27.85 | 25.87 |
| WV-38260 | WV-38452 | 38.20 | 48.66 | 43.43 |
| WV-38261 | WV-38453 | 36.10 | 44.81 | 40.45 |
| WV-38262 | WV-38454 | 42.68 | 71.28 | 56.98 |
| WV-38263 | WV-38455 | 30.26 | 35.27 | 32.77 |
| WV-38264 | WV-38456 | 30.91 | 44.96 | 37.94 |
| WV-38265 | WV-38457 | 27.30 | 47.03 | 37.17 |
| WV-38266 | WV-38458 | 21.28 | 37.30 | 29.29 |
| WV-38267 | WV-38459 | 25.47 | 32.06 | 28.77 |
| WV-38268 | WV-38460 | 29.94 | 35.08 | 32.51 |
| WV-38269 | WV-38461 | 27.17 | 37.63 | 32.40 |
| WV-38270 | WV-38462 | 26.14 | 36.69 | 31.41 |
| WV-38271 | WV-38463 | 34.57 | 36.74 | 35.66 |
| WV-38272 | WV-38464 | 29.86 | 42.49 | 36.17 |
| WV-38273 | WV-38465 | 34.90 | 64.75 | 49.83 |
| WV-38274 | WV-38466 | 54.06 | 71.75 | 62.91 |
| WV-38275 | WV-38467 | 31.70 | 28.07 | 29.88 |
| WV-38276 | WV-38468 | 46.80 | 45.46 | 46.13 |
| WV-38277 | WV-38469 | 27.82 | 35.92 | 31.87 |
| WV-38278 | WV-38470 | 26.32 | 36.22 | 31.27 |
| WV-38279 | WV-38471 | 13.10 | 22.72 | 17.91 |
| WV-38280 | WV-38472 | 28.22 | 37.22 | 32.72 |
| WV-38281 | WV-38473 | 38.95 | 66.96 | 52.96 |
| WV-38282 | WV-38474 | 11.88 | 23.94 | 17.91 |
| WV-38283 | WV-38475 | 20.27 | 30.63 | 25.45 |
| WV-38284 | WV-38476 | 15.58 | 20.32 | 17.95 |
| WV-38285 | WV-38477 | 36.99 | 39.75 | 38.37 |
| WV-38286 | WV-38478 | 26.26 | 27.60 | 26.93 |
| WV-38287 | WV-38479 | 34.93 | 45.38 | 40.16 |
| WV-38288 | WV-38480 | 54.42 | 51.81 | 53.12 |
| WV-38289 | WV-38481 | 27.12 | 33.46 | 30.29 |
| WV-38290 | WV-38482 | 19.72 | 26.55 | 23.13 |
| WV-38291 | WV-38483 | 46.37 | 35.76 | 41.06 |
| WV-38292 | WV-38484 | 21.15 | 24.23 | 22.69 |
| WV-38293 | WV-38485 | 22.68 | 23.83 | 23.25 |
| WV-38294 | WV-38486 | 14.78 | 24.32 | 19.55 |
| WV-38295 | WV-38487 | 51.54 | 61.96 | 56.75 |
| WV-38296 | WV-38488 | N.D. | 24.20 | 24.20 |
| WV-38297 | WV-38489 | 12.91 | 32.26 | 22.58 |
| WV-38298 | WV-38490 | 17.32 | 25.72 | 21.52 |
| WV-38299 | WV-38491 | 30.01 | 23.62 | 26.82 |
| WV-38300 | WV-38492 | 12.83 | 23.31 | 18.07 |
| WV-38301 | WV-38493 | 26.64 | 25.33 | 25.99 |
| WV-38302 | WV-38494 | 22.76 | 28.27 | 25.52 |
| WV-38303 | WV-38495 | 41.95 | 56.77 | 49.36 |
| WV-38304 | WV-38496 | 28.02 | 37.73 | 32.87 |
| WV-38305 | WV-38497 | 13.76 | 15.39 | 14.57 |
| WV-38306 | WV-38498 | 18.54 | 27.69 | 23.11 |
| WV-38307 | WV-38499 | 45.71 | 54.13 | 49.92 |
| WV-38308 | WV-38500 | 20.18 | 25.56 | 22.87 |
| WV-38309 | WV-38501 | 45.03 | 45.88 | 45.45 |
| WV-38310 | WV-38502 | 52.42 | 51.80 | 52.11 |
| WV-38311 | WV-38503 | 56.26 | 98.83 | 77.55 |
| WV-38312 | WV-38504 | 14.73 | 15.17 | 14.95 |
| WV-38313 | WV-38505 | 12.56 | 16.94 | 14.75 |
| WV-38314 | WV-38506 | 36.76 | 45.06 | 40.91 |
| WV-38315 | WV-38507 | 25.86 | 36.26 | 31.06 |
| WV-38316 | WV-38508 | 21.24 | 21.06 | 21.15 |
| WV-38317 | WV-38509 | 11.75 | 11.05 | 11.40 |
| WV-38318 | WV-38510 | 10.40 | 10.10 | 10.25 |
| WV-38319 | WV-38511 | 9.71 | 13.73 | 11.72 |
| WV-38320 | WV-38512 | 26.27 | 35.17 | 30.72 |
| WV-38321 | WV-38513 | 21.75 | 25.22 | 23.48 |
| WV-38322 | WV-38514 | 13.89 | 24.37 | 19.13 |
| WV-38323 | WV-38515 | 32.58 | 37.91 | 35.25 |
| WV-38324 | WV-38516 | 11.46 | 13.14 | 12.30 |
| WV-38325 | WV-38517 | 11.03 | 15.03 | 13.03 |
| WV-38326 | WV-38518 | 92.94 | 101.60 | 97.27 |
| WV-38327 | WV-38519 | 12.18 | 19.20 | 15.69 |
| WV-38328 | WV-38520 | 75.25 | 118.90 | 97.07 |
| WV-38329 | WV-38521 | 14.21 | 26.82 | 20.51 |
| WV-38330 | WV-38522 | 20.56 | 28.78 | 24.67 |
| WV-38331 | WV-38523 | 60.93 | 90.04 | 75.49 |
| WV-38332 | WV-38524 | 14.90 | 19.29 | 17.10 |
| WV-38333 | WV-38525 | 27.12 | 27.95 | 27.53 |
| WV-38335 | WV-38527 | 33.54 | 39.11 | 36.32 |
| WV-38336 | WV-38528 | 11.54 | 18.98 | 15.26 |
| WV-38337 | WV-38529 | 13.53 | 16.31 | 14.92 |
| WV-38338 | WV-38530 | 13.41 | N.D. | 13.41 |
| WV-38339 | WV-38531 | 14.20 | 22.43 | 18.32 |
| WV-38340 | WV-38532 | 16.68 | 16.94 | 16.81 |
| WV-38341 | WV-38533 | 40.47 | 44.93 | 42.70 |
| WV-38342 | WV-38534 | 13.07 | 17.35 | 15.21 |
| WV-38343 | WV-38535 | 22.66 | 27.40 | 25.03 |
| WV-38344 | WV-38536 | 27.14 | 36.79 | 31.96 |
| WV-38345 | WV-38537 | 15.79 | 18.49 | 17.14 |
| WV-38346 | WV-38538 | 10.89 | 19.46 | 15.18 |
| WV-38347 | WV-38539 | 16.17 | 33.36 | 24.77 |
| WV-38348 | WV-38540 | 15.75 | 15.52 | 15.63 |
| WV-38349 | WV-38541 | 30.37 | 37.99 | 34.18 |
| WV-38350 | WV-38542 | 24.82 | 25.20 | 25.01 |
| WV-38351 | WV-38543 | 13.72 | 23.55 | 18.64 |
| WV-38352 | WV-38544 | 13.91 | 19.32 | 16.61 |
| WV-38353 | WV-38545 | 19.14 | 24.29 | 21.71 |
| WV-38354 | WV-38546 | 10.65 | 15.26 | 12.96 |
| WV-38355 | WV-38547 | 15.23 | 24.34 | 19.78 |
| WV-38356 | WV-38548 | 16.07 | 19.68 | 17.87 |
| WV-38357 | WV-38549 | 12.77 | 16.77 | 14.77 |
| WV-38358 | WV-38550 | 25.13 | 21.23 | 23.18 |
| WV-38359 | WV-38551 | 20.14 | 17.76 | 18.95 |
| WV-38360 | WV-38552 | 14.80 | 18.50 | 16.65 |
| WV-38361 | WV-38553 | 15.84 | 20.50 | 18.17 |
| WV-38362 | WV-38554 | 14.82 | 18.24 | 16.53 |
| WV-38363 | WV-38555 | 20.13 | 28.44 | 24.28 |
| WV-38364 | WV-38556 | 21.27 | 26.13 | 23.70 |
| WV-38365 | WV-38557 | 15.11 | 14.27 | 14.69 |
| WV-38366 | WV-38558 | 30.22 | 40.16 | 35.19 |
| WV-38367 | WV-38559 | 80.39 | 72.19 | 76.29 |
| WV-38368 | WV-38560 | 24.81 | 36.22 | 30.51 |
| WV-38369 | WV-38561 | 24.38 | 32.37 | 28.37 |
| WV-38370 | WV-38562 | 17.01 | 21.11 | 19.06 |
| WV-38371 | WV-38563 | 26.43 | 30.19 | 28.31 |
| WV-38372 | WV-38564 | 31.47 | 31.45 | 31.46 |
| WV-38373 | WV-38565 | 25.09 | 37.93 | 31.51 |
| WV-38374 | WV-38566 | 38.40 | 37.48 | 37.94 |
| WV-38375 | WV-38567 | 40.97 | 43.58 | 42.27 |
| WV-38376 | WV-38568 | 30.64 | 36.59 | 33.62 |
| WV-38377 | WV-38569 | 35.11 | 44.12 | 39.61 |
| WV-38378 | WV-38570 | 20.51 | 32.38 | 26.44 |
| WV-38379 | WV-38571 | 34.51 | 38.28 | 36.39 |
| WV-38380 | WV-38572 | 27.92 | 36.68 | 32.30 |
| WV-38381 | WV-38573 | 37.05 | 32.05 | 34.55 |
| WV-38382 | WV-38574 | 37.30 | 39.96 | 38.63 |
| WV-38383 | WV-38575 | 33.96 | 41.07 | 37.51 |
| WV-38384 | WV-38576 | 53.55 | 56.98 | 55.26 |
| WV-38385 | WV-38577 | 37.96 | 39.60 | 38.78 |
| WV-38386 | WV-38578 | 32.80 | 51.22 | 42.01 |
| WV-38387 | WV-38579 | 29.55 | 37.28 | 33.41 |
| WV-38388 | WV-38580 | 36.87 | 38.65 | 37.76 |
| WV-38389 | WV-38581 | 44.41 | 46.48 | 45.44 |
| WV-38390 | WV-38582 | 30.15 | 45.19 | 37.67 |
| WV-38391 | WV-38583 | 38.48 | 50.36 | 44.42 |
| WV-38392 | WV-38584 | 30.10 | 27.99 | 29.05 |
| WV-38393 | WV-38585 | 37.50 | 44.21 | 40.85 |
| WV-38394 | WV-38586 | 24.53 | 38.93 | 31.73 |
| WV-38395 | WV-38587 | 34.73 | 42.20 | 38.46 |
| WV-38396 | WV-38588 | 34.91 | 46.74 | 40.82 |
| WV-38397 | WV-38589 | 38.22 | 41.13 | 39.68 |
| WV-38398 | WV-38590 | 130.09 | 101.44 | 115.77 |
| WV-38399 | WV-38591 | 134.17 | 128.47 | 131.32 |
| WV-38400 | WV-38592 | 143.79 | 119.09 | 131.44 |
| WV-38401 | WV-38593 | 119.51 | 113.29 | 116.40 |
| WV-38402 | WV-38594 | 117.65 | 152.89 | 135.27 |
| WV-38403 | WV-38595 | 118.70 | 121.52 | 120.11 |
| WV-38404 | WV-38596 | 24.18 | 22.64 | 23.41 |
| WV-38405 | WV-38597 | 42.49 | 35.75 | 39.12 |
| WV-38406 | WV-38598 | 21.59 | 30.64 | 26.11 |
| WV-38407 | WV-38599 | 28.35 | 26.38 | 27.37 |
| WV-38408 | WV-38600 | 30.62 | 32.31 | 31.46 |
| WV-38409 | WV-38601 | 23.39 | 24.40 | 23.90 |
| WV-38410 | WV-38602 | 29.05 | 29.51 | 29.28 |
| WV-38411 | WV-38603 | 25.27 | 19.65 | 22.46 |
| WV-38412 | WV-38604 | 23.93 | 30.67 | 27.30 |
| WV-38413 | WV-38605 | 29.69 | 31.01 | 30.35 |
| WV-38414 | WV-38606 | 32.96 | 36.26 | 34.61 |
| WV-38415 | WV-38607 | 20.36 | 24.10 | 22.23 |
| WV-38416 | WV-38608 | 29.11 | 30.73 | 29.92 |
| WV-38417 | WV-38609 | 32.51 | 32.68 | 32.59 |
| WV-38418 | WV-38610 | 28.13 | 26.89 | 27.51 |

[1028] Table 3 shows % human HSD17B13 mRNA remaining (at 10, 1 and 0.1 μM by gymnotic delivery) relative to human SFRS9 control. N=2. N.D.: Not determined.

TABLE 3

| | | 10 μM | | | 1 μM | | | 0.1 μM | | |
|---|---|---|---|---|---|---|---|---|---|---|
| | | % remaining | % remaining | | % remaining | % remaining | | % remaining | % remaining | |
| | | mRNA | mRNA | | mRNA | mRNA | | mRNA | mRNA | |
| | | (hHSD17B13/ | (hHSD17B13/ | | (hHSD17B13/ | (hHSD17B13/ | | (hHSD17B13/ | (hHSD17B13/ | |
| Guide | Passenger | hSFRS9)-1 | hSFRS9)-2 | Mean | hSFRS9)-1 | hSFRS9)-2 | Mean | hSFRS9)-1 | hSFRS9)-2 | Mean |
| WV- | WV- | N.D. | N.D. | N.D. | 92.55 | 77.58 | 85.06 | 99.21 | 94.50 | 96.85 |
| 38279 | 38471 | | | | | | | | | |
| WV- | WV- | 57.95 | 68.33 | 63.14 | 117.45 | 107.83 | 112.64 | 96.43 | 120.90 | 108.66 |
| 38282 | 38474 | | | | | | | | | |
| WV- | WV- | 65.94 | 56.24 | 61.09 | 93.12 | 90.08 | 91.60 | 109.04 | 107.69 | 108.37 |
| 38284 | 38476 | | | | | | | | | |
| WV- | WV- | 68.80 | 51.61 | 60.20 | 96.00 | 77.64 | 86.82 | 115.23 | 118.13 | 116.68 |
| 38294 | 38486 | | | | | | | | | |
| WV- | WV- | 75.86 | 74.15 | 75.00 | 111.55 | N.D. | 111.55 | 93.35 | 109.88 | 101.61 |
| 38298 | 38490 | | | | | | | | | |
| WV- | WV- | 77.59 | 76.89 | 77.24 | 107.74 | 95.82 | 101.78 | 106.72 | 106.23 | 106.47 |
| 38300 | 38492 | | | | | | | | | |
| WV- | WV- | 52.07 | 39.79 | 45.93 | 94.76 | 97.06 | 95.91 | 107.20 | 96.64 | 101.92 |
| 38305 | 38497 | | | | | | | | | |
| WV- | WV- | N.D. | N.D. | N.D. | 26.12 | 33.09 | 29.60 | 89.89 | 78.89 | 84.39 |
| 38312 | 38504 | | | | | | | | | |
| WV- | WV- | N.D. | 26.52 | 26.52 | 70.62 | 73.99 | 72.31 | 86.08 | 89.09 | 87.58 |
| 38313 | 38505 | | | | | | | | | |
| WV- | WV- | 23.67 | 34.50 | 29.08 | 61.76 | 68.75 | 65.26 | 81.88 | 85.46 | 83.67 |
| 38317 | 38509 | | | | | | | | | |
| WV- | WV- | 16.33 | 16.90 | 16.61 | 32.19 | 53.22 | 42.70 | 62.12 | 60.90 | 61.51 |
| 38318 | 38510 | | | | | | | | | |
| WV- | WV- | N.D. | 23.39 | 23.39 | 87.20 | 54.47 | 70.84 | 80.76 | 94.36 | 87.56 |
| 38319 | 38511 | | | | | | | | | |
| WV- | WV- | N.D. | N.D. | N.D. | 17.48 | 26.91 | 22.19 | 51.98 | 55.74 | 53.86 |
| 38322 | 38514 | | | | | | | | | |
| WV- | WV- | N.D. | N.D. | N.D. | 15.17 | 12.65 | 13.91 | 39.77 | 44.60 | 42.18 |
| 38324 | 38516 | | | | | | | | | |
| WV- | WV- | 14.32 | 14.50 | 14.41 | 36.37 | 37.22 | 36.80 | 54.44 | 54.61 | 54.52 |
| 38325 | 38517 | | | | | | | | | |
| WV- | WV- | N.D. | 5.95 | 5.95 | 20.81 | 21.80 | 21.31 | 55.61 | 56.54 | 56.08 |
| 38327 | 38519 | | | | | | | | | |
| WV- | WV- | 29.47 | 31.41 | 30.44 | 41.61 | 46.86 | 44.23 | 66.80 | 77.84 | 72.32 |
| 38329 | 38521 | | | | | | | | | |
| WV- | WV- | 45.51 | 42.68 | 44.09 | 70.40 | 71.45 | 70.92 | 85.83 | 72.05 | 78.94 |
| 38332 | 38524 | | | | | | | | | |
| WV- | WV- | 31.29 | 36.03 | 33.66 | 43.23 | 40.39 | 41.81 | 43.18 | 36.72 | 39.95 |
| 38336 | 38528 | | | | | | | | | |
| WV- | WV- | 27.17 | 25.08 | 26.13 | 81.05 | 69.86 | 75.45 | 101.55 | 89.58 | 95.56 |
| 38337 | 38529 | | | | | | | | | |
| WV- | WV- | 47.97 | 46.39 | 47.18 | 76.87 | 81.63 | 79.25 | 84.28 | 108.88 | 96.58 |
| 38338 | 38530 | | | | | | | | | |
| WV- | WV- | 90.68 | N.D. | 90.68 | 104.01 | 105.16 | 104.58 | 112.43 | 107.28 | 109.86 |
| 38340 | 38532 | | | | | | | | | |
| WV- | WV- | N.D. | 103.19 | 103.19 | 84.72 | 112.96 | 98.84 | 112.11 | 115.31 | 113.71 |
| 38342 | 38534 | | | | | | | | | |
| WV- | WV- | 27.46 | N.D. | 27.46 | 77.01 | 73.20 | 75.11 | 86.42 | 93.21 | 89.81 |
| 38345 | 38537 | | | | | | | | | |
| WV- | WV- | 8.76 | 15.34 | 12.05 | 45.36 | 46.45 | 45.90 | 82.00 | 65.34 | 73.67 |
| 38346 | 38538 | | | | | | | | | |
| WV- | WV- | 35.43 | 42.08 | 38.76 | 68.19 | 81.38 | 74.79 | 88.04 | 77.47 | 82.76 |
| 38348 | 38540 | | | | | | | | | |
| WV- | WV- | 30.81 | N.D. | 30.81 | 58.74 | 49.58 | 54.16 | 79.56 | 55.53 | 67.54 |
| 38352 | 38544 | | | | | | | | | |
| WV- | WV- | 29.93 | 22.92 | 26.42 | 44.86 | 32.20 | 38.53 | 57.67 | 45.11 | 51.39 |
| 38354 | 38546 | | | | | | | | | |
| WV- | WV- | 26.48 | 26.03 | 26.25 | 55.47 | 50.19 | 52.83 | 90.79 | 77.65 | 84.22 |
| 38356 | 38548 | | | | | | | | | |
| WV- | WV- | 58.92 | 50.89 | 54.90 | 95.10 | 80.80 | 87.95 | 104.43 | 101.15 | 102.79 |
| 38357 | 38549 | | | | | | | | | |
| WV- | WV- | 21.84 | 34.10 | 27.97 | 70.54 | 63.67 | 67.11 | 103.64 | 67.65 | 85.64 |
| 38360 | 38552 | | | | | | | | | |
| WV- | WV- | 8.03 | 7.46 | 7.75 | 61.01 | 72.06 | 66.53 | 77.46 | 62.68 | 70.07 |
| 38361 | 38553 | | | | | | | | | |
| WV- | WV- | 27.95 | 28.41 | 28.18 | 65.60 | 62.28 | 63.94 | 61.62 | 69.10 | 65.36 |
| 38362 | 38554 | | | | | | | | | |
| WV- | WV- | 46.83 | 48.62 | 47.72 | 72.16 | 60.10 | 66.13 | 84.33 | 100.09 | 92.21 |
| 38365 | 38557 | | | | | | | | | |
| WV- | WV- | 31.75 | 19.19 | 25.47 | 67.87 | 70.38 | 69.13 | 83.12 | 113.84 | 98.48 |
| 38370 | 38562 | | | | | | | | | |

[1029] Table 4 shows % human HSD17B13 miRNA remaining (at 1, 0.3 and 0.1 nM by transfection) relative to human SFRS9 control. N=2. N.D.: Not determined.

TABLE 4

| | | 1 nM | | | 0.3 nM | | | 0.1 nM | | |
|---|---|---|---|---|---|---|---|---|---|---|
| | | % remaining | % remaining | | % remaining | % remaining | | % remaining | % remaining | |
| | | mRNA | mRNA | | mRNA | mRNA | | mRNA | mRNA | |
| | | (hHSD17B13/ | (hHSD17B13/ | | (hHSD17B13/ | (hHSD17B13/ | | (hHSD17B13/ | (hHSD17B13/ | |
| Guide | Passenger | hSFRS9)-1 | hSFRS9)-2 | Mean | hSFRS9)-1 | hSFRS9)-2 | Mean | hSFRS9)-1 | hSFRS9)-2 | Mean |
| WV- | WV- | 7.40 | 9.56 | 8.48 | 17.65 | 10.57 | 14.11 | 51.31 | 46.23 | 48.77 |
| 38240 | 38432 | | | | | | | | | |
| WV- | WV- | 11.91 | 11.41 | 11.66 | 22.21 | 17.20 | 19.70 | 40.41 | 42.70 | 41.56 |
| 38242 | 38434 | | | | | | | | | |
| WV- | WV- | 11.04 | 9.21 | 10.12 | 15.93 | 13.87 | 14.90 | 32.50 | 39.26 | 35.88 |
| 38246 | 38438 | | | | | | | | | |
| WV- | WV- | 11.56 | 11.18 | 11.37 | 32.30 | 13.23 | 22.76 | 21.72 | 23.06 | 22.39 |
| 38248 | 38440 | | | | | | | | | |
| WV- | WV- | 12.25 | 9.46 | 10.85 | 17.89 | 20.07 | 18.98 | 30.02 | 28.20 | 29.11 |
| 38249 | 38441 | | | | | | | | | |
| WV- | WV- | 9.42 | 3.55 | 6.48 | 14.98 | 14.11 | 14.55 | 35.93 | 46.25 | 41.09 |
| 38250 | 38442 | | | | | | | | | |
| WV- | WV- | 13.97 | 11.90 | 12.94 | 24.47 | 18.55 | 21.51 | 60.62 | 91.76 | 76.19 |
| 38257 | 38449 | | | | | | | | | |
| WV- | WV- | 9.60 | 10.63 | 10.11 | 19.77 | N.D. | 19.77 | 24.18 | N.D. | 24.18 |
| 38258 | 38450 | | | | | | | | | |
| WV- | WV- | 9.50 | 6.54 | 8.02 | 14.41 | 12.92 | 13.67 | 56.79 | 54.81 | 55.80 |
| 38269 | 38461 | | | | | | | | | |
| WV- | WV- | 6.43 | 10.41 | 8.42 | 24.57 | 24.51 | 24.54 | 51.76 | 44.63 | 48.19 |
| 38270 | 38462 | | | | | | | | | |
| WV- | WV- | 7.07 | 6.38 | 6.73 | 16.66 | 11.48 | 14.07 | 49.28 | 44.57 | 46.92 |
| 38279 | 38471 | | | | | | | | | |
| WV- | WV- | 13.24 | 9.00 | 11.12 | 60.58 | 28.95 | 44.76 | 67.89 | 55.83 | 61.86 |
| 38282 | 38474 | | | | | | | | | |
| WV- | WV- | 8.82 | 3.71 | 6.26 | 22.08 | 13.09 | 17.58 | 55.72 | 32.64 | 44.18 |
| 38284 | 38476 | | | | | | | | | |
| WV- | WV- | 15.95 | 15.18 | 15.56 | 76.08 | 68.53 | 72.31 | 47.97 | 163.51 | 105.74 |
| 38285 | 38477 | | | | | | | | | |
| WV- | WV- | 10.07 | 15.92 | 12.99 | 68.15 | 52.77 | 60.46 | 109.18 | 137.56 | 123.37 |
| 38290 | 38482 | | | | | | | | | |
| WV- | WV- | 12.05 | 6.99 | 9.52 | 29.98 | 23.22 | 26.60 | 45.15 | 99.50 | 72.33 |
| 38292 | 38484 | | | | | | | | | |
| WV- | WV- | 15.01 | 5.64 | 10.32 | 31.71 | 27.92 | 29.82 | 94.24 | 80.75 | 87.49 |
| 38293 | 38485 | | | | | | | | | |
| WV- | WV- | 7.47 | 7.30 | 7.38 | 25.68 | 19.54 | 22.61 | 70.27 | 51.56 | 60.92 |
| 38294 | 38486 | | | | | | | | | |
| WV- | WV- | 12.29 | 14.98 | 13.63 | 23.25 | 27.66 | 25.46 | 110.12 | 103.19 | 106.66 |
| 38296 | 38488 | | | | | | | | | |
| WV- | WV- | 23.27 | 17.51 | 20.39 | 53.00 | 102.24 | 77.62 | 102.86 | 137.35 | 120.11 |
| 38297 | 38489 | | | | | | | | | |
| WV- | WV- | 14.59 | 12.35 | 13.47 | 40.35 | 78.08 | 59.21 | 97.84 | 115.79 | 106.81 |
| 38298 | 38490 | | | | | | | | | |
| WV- | WV- | 8.34 | 12.71 | 10.53 | 29.70 | 57.42 | 43.56 | 93.52 | 113.02 | 103.27 |
| 38300 | 38492 | | | | | | | | | |
| WV- | WV- | 9.77 | 9.39 | 9.58 | 21.85 | 11.24 | 16.55 | 39.85 | 51.87 | 45.86 |
| 38301 | 38493 | | | | | | | | | |
| WV- | WV- | 4.30 | 5.19 | 4.75 | 49.48 | N.D. | 49.48 | 43.20 | 105.81 | 74.51 |
| 38305 | 38497 | | | | | | | | | |
| WV- | WV- | 21.47 | 21.48 | 21.47 | 65.66 | 67.23 | 66.45 | N.D. | 140.39 | 140.39 |
| 38306 | 38498 | | | | | | | | | |
| WV- | WV- | 12.43 | 12.36 | 12.39 | 54.88 | 37.06 | 45.97 | 89.48 | 135.68 | 112.58 |
| 38308 | 38500 | | | | | | | | | |
| WV- | WV- | 15.80 | 11.59 | 13.69 | 32.54 | 32.66 | 32.60 | 85.16 | 128.23 | 106.69 |
| 38312 | 38504 | | | | | | | | | |
| WV- | WV- | 7.57 | 4.82 | 6.19 | 85.38 | 47.21 | 66.30 | 85.54 | 75.45 | 80.49 |
| 38313 | 38505 | | | | | | | | | |
| WV- | WV- | 20.93 | 21.24 | 21.08 | 101.12 | 90.92 | 96.02 | 100.29 | 161.49 | 130.89 |
| 38316 | 38508 | | | | | | | | | |
| WV- | WV- | 14.69 | 11.18 | 12.94 | 34.94 | 43.65 | 39.29 | 72.34 | 131.03 | 101.68 |
| 38317 | 38509 | | | | | | | | | |
| WV- | WV- | 12.82 | 11.96 | 12.39 | 31.11 | 27.98 | 29.54 | 69.47 | 69.13 | 69.30 |
| 38318 | 38510 | | | | | | | | | |
| WV- | WV- | 8.20 | 7.90 | 8.05 | 24.05 | 40.60 | 32.32 | 100.63 | 118.32 | 109.48 |
| 38319 | 38511 | | | | | | | | | |
| WV- | WV- | 11.71 | 9.20 | 10.46 | 54.87 | 60.83 | 57.85 | 80.63 | 92.80 | 86.71 |
| 38322 | 38514 | | | | | | | | | |
| WV- | WV- | 5.68 | 2.30 | 3.99 | 16.53 | 15.90 | 16.21 | 45.40 | 45.93 | 45.66 |
| 38324 | 38516 | | | | | | | | | |
| WV- | WV- | 10.16 | 7.19 | 8.68 | 35.91 | 20.70 | 28.30 | 83.28 | 99.73 | 91.50 |
| 38325 | 38517 | | | | | | | | | |
| WV- | WV- | 3.99 | 4.54 | 4.27 | 37.08 | 27.76 | 32.42 | 45.30 | 45.80 | 45.55 |
| 38327 | 38519 | | | | | | | | | |
| WV- | WV- | 85.02 | 51.07 | 68.04 | 183.72 | 97.67 | 140.69 | 159.10 | 122.08 | 140.59 |
| 38329 | 38521 | | | | | | | | | |
| WV- | WV- | 4.24 | 11.18 | 7.71 | 77.90 | 70.61 | 74.26 | 172.36 | 98.78 | 135.57 |
| 38332 | 38524 | | | | | | | | | |
| WV- | WV- | 108.40 | 138.74 | 123.57 | 114.68 | 127.70 | 121.19 | 162.93 | 172.34 | 167.64 |
| 38336 | 38528 | | | | | | | | | |
| WV- | WV- | 14.85 | 17.14 | 15.99 | 41.59 | 55.47 | 48.53 | 114.71 | 160.45 | 137.58 |
| 38337 | 38529 | | | | | | | | | |
| WV- | WV- | 23.95 | 21.44 | 22.70 | 60.94 | 50.41 | 55.68 | 86.06 | 108.97 | 97.51 |
| 38338 | 38530 | | | | | | | | | |
| WV- | WV- | 9.86 | 10.15 | 10.00 | 35.34 | 40.55 | 37.94 | 91.09 | 109.60 | 100.34 |
| 38339 | 38531 | | | | | | | | | |
| WV- | WV- | 74.50 | 34.95 | 54.73 | 94.21 | 79.27 | 86.74 | 158.39 | 124.03 | 141.21 |
| 38340 | 38532 | | | | | | | | | |
| WV- | WV- | 31.41 | 14.99 | 23.20 | 61.15 | 92.64 | 76.90 | 136.20 | 170.37 | 153.28 |
| 38342 | 38534 | | | | | | | | | |
| WV- | WV- | 9.36 | 16.83 | 13.09 | 68.19 | 89.43 | 78.81 | 117.72 | 145.78 | 131.75 |
| 38345 | 38537 | | | | | | | | | |
| WV- | WV- | 10.97 | 7.80 | 9.38 | 54.56 | 36.73 | 45.65 | 102.08 | 103.44 | 102.76 |
| 38346 | 38538 | | | | | | | | | |
| WV- | WV- | 7.61 | 6.33 | 6.97 | 24.03 | 22.11 | 23.07 | 64.74 | 25.62 | 45.18 |
| 38347 | 38539 | | | | | | | | | |
| WV- | WV- | 31.95 | 28.13 | 30.04 | 89.71 | 108.02 | 98.86 | 145.47 | 163.83 | 154.65 |
| 38348 | 38540 | | | | | | | | | |
| WV- | WV- | 42.40 | 44.35 | 43.38 | 79.22 | 118.92 | 99.07 | 122.70 | 177.81 | 150.25 |
| 38351 | 38543 | | | | | | | | | |
| WV- | WV- | 6.87 | 7.13 | 7.00 | 29.95 | 25.84 | 27.89 | 103.20 | 49.77 | 76.48 |
| 38352 | 38544 | | | | | | | | | |
| WV- | WV- | 20.17 | 15.46 | 17.82 | 40.31 | 40.48 | 40.40 | 92.69 | 129.94 | 111.32 |
| 38354 | 38546 | | | | | | | | | |
| WV- | WV- | 5.99 | 5.73 | 5.86 | 58.78 | 51.97 | 55.38 | 50.97 | 66.29 | 58.63 |
| 38355 | 38547 | | | | | | | | | |
| WV- | WV- | 7.89 | 7.04 | 7.46 | 26.92 | 32.18 | 29.55 | 93.47 | 91.82 | 92.65 |
| 38356 | 38548 | | | | | | | | | |
| WV- | WV- | 21.07 | 17.50 | 19.29 | 84.83 | 51.41 | 68.12 | 115.00 | 109.47 | 112.24 |
| 38357 | 38549 | | | | | | | | | |
| WV- | WV- | 5.65 | 10.25 | 7.95 | 18.08 | 35.60 | 26.84 | 88.37 | 103.44 | 95.90 |
| 38359 | 38551 | | | | | | | | | |
| WV- | WV- | 12.26 | 8.71 | 10.48 | 51.58 | 45.82 | 48.70 | 147.72 | 111.61 | 129.67 |
| 38360 | 38552 | | | | | | | | | |
| WV- | WV- | 9.62 | 4.67 | 7.15 | 27.86 | 25.42 | 26.64 | 70.30 | 88.91 | 79.60 |
| 38361 | 38553 | | | | | | | | | |
| WV- | WV- | 11.84 | 8.18 | 10.01 | 77.67 | 65.78 | 71.72 | 89.07 | 127.97 | 108.52 |
| 38362 | 38554 | | | | | | | | | |
| WV- | WV- | 17.38 | 16.05 | 16.71 | 38.50 | 36.40 | 37.45 | 107.95 | 137.63 | 122.79 |
| 38365 | 38557 | | | | | | | | | |
| WV- | WV- | 12.74 | 10.34 | 11.54 | 48.48 | 39.88 | 44.18 | 64.89 | 74.29 | 69.59 |
| 38370 | 38562 | | | | | | | | | |
| WV- | WV- | 20.23 | N.D. | 20.23 | 50.88 | 66.73 | 58.80 | 110.78 | 103.38 | 107.08 |
| 38404 | 38596 | | | | | | | | | |
| WV- | WV- | 32.26 | 23.04 | 27.65 | 43.15 | 28.68 | 35.91 | 80.65 | 78.94 | 79.79 |
| 38409 | 38601 | | | | | | | | | |
| WV- | WV- | 33.91 | 24.99 | 29.45 | 27.57 | 13.87 | 20.72 | 49.57 | 65.32 | 57.44 |
| 38411 | 38603 | | | | | | | | | |
| WV- | WV- | 35.92 | 26.53 | 31.23 | 56.84 | 56.53 | 56.69 | 106.35 | 109.95 | 108.15 |
| 38415 | 38607 | | | | | | | | | |

[1030] Table 5 shows % human HSD17B13 miRNA remaining (at 1, 0.3 and 0.1 nM by transfection) relative to human SFRS9 control. N=2. N.D.: Not determined.

TABLE 5

| | | 1 nM | | | 0.3 nM | | | 0.1 nM | | |
|---|---|---|---|---|---|---|---|---|---|---|
| | | % remaining | % remaining | | % remaining | % remaining | | % remaining | % remaining | |
| | | mRNA | mRNA | | mRNA | mRNA | | mRNA | mRNA | |
| | | (hHSD17B13/ | (hHSD17B13/ | | (hHSD17B13/ | (hHSD17B13/ | | (hHSD17B13/ | (hHSD17B13/ | |
| Guide | Passenger | hSFRS9)-1 | hSFRS9)-2 | Mean | hSFRS9)-1 | hSFRS9)-2 | Mean | hSFRS9)-1 | hSFRS9)-2 | Mean |
| WV- | WV- | 33.41 | 23.59 | 28.50 | 52.17 | 64.79 | 58.48 | 66.54 | 77.57 | 72.05 |
| 42129 | 42219 | | | | | | | | | |
| WV- | WV- | 31.51 | 14.73 | 23.12 | 56.10 | 37.78 | 46.94 | 74.05 | 73.97 | 74.01 |
| 42130 | 42220 | | | | | | | | | |
| WV- | WV- | 33.57 | 54.63 | 44.10 | 106.76 | 179.91 | 143.33 | 100.32 | 141.91 | 121.12 |
| 42131 | 42221 | | | | | | | | | |
| WV- | WV- | 27.30 | 17.91 | 22.60 | 56.61 | 54.86 | 55.73 | 47.56 | 70.14 | 58.85 |
| 42132 | 42222 | | | | | | | | | |
| WV- | WV- | 26.42 | 30.03 | 28.23 | 70.09 | 54.93 | 62.51 | 78.14 | 60.53 | 69.34 |
| 42133 | 42223 | | | | | | | | | |
| WV- | WV- | 41.24 | 28.10 | 34.67 | 60.65 | 69.58 | 65.11 | 70.83 | 87.26 | 79.05 |
| 42134 | 42224 | | | | | | | | | |
| WV- | WV- | 38.66 | 23.33 | 30.99 | 76.74 | 59.32 | 68.03 | 75.15 | 86.15 | 80.65 |
| 42135 | 42225 | | | | | | | | | |
| WV- | WV- | 32.70 | 24.12 | 28.41 | 59.27 | 73.91 | 66.59 | 86.08 | 75.87 | 80.97 |
| 42136 | 42226 | | | | | | | | | |
| WV- | WV- | 28.88 | 12.48 | 20.68 | 31.58 | 43.53 | 37.55 | 52.71 | 37.81 | 45.26 |
| 42137 | 42227 | | | | | | | | | |
| WV- | WV- | 22.58 | 21.29 | 21.93 | 44.36 | 43.09 | 43.73 | 46.89 | 63.98 | 55.43 |
| 42138 | 42228 | | | | | | | | | |
| WV- | WV- | 44.52 | 52.34 | 48.43 | 101.36 | 96.93 | 99.14 | 90.74 | 103.19 | 96.96 |
| 42139 | 42229 | | | | | | | | | |
| WV- | WV- | 30.50 | 25.22 | 27.86 | 62.75 | 45.58 | 54.16 | 73.14 | 75.84 | 74.49 |
| 42140 | 42230 | | | | | | | | | |
| WV- | WV- | 25.47 | 20.59 | 23.03 | 40.48 | 60.30 | 50.39 | 57.34 | 52.90 | 55.12 |
| 42141 | 42231 | | | | | | | | | |
| WV- | WV- | 23.83 | 26.14 | 24.99 | 45.51 | 50.17 | 47.84 | 69.28 | 72.15 | 70.72 |
| 42142 | 42232 | | | | | | | | | |
| WV- | WV- | 16.76 | 23.46 | 20.11 | 40.79 | 37.74 | 39.27 | 32.10 | 28.55 | 30.33 |
| 42143 | 42233 | | | | | | | | | |
| WV- | WV- | 25.64 | 19.12 | 22.38 | 38.01 | 37.57 | 37.79 | 37.37 | 35.07 | 36.22 |
| 42144 | 42234 | | | | | | | | | |
| WV- | WV- | 35.23 | 19.57 | 27.40 | 44.58 | 38.35 | 41.46 | 28.51 | 34.89 | 31.70 |
| 42145 | 42235 | | | | | | | | | |
| WV- | WV- | 27.75 | 18.98 | 23.37 | 29.12 | 29.21 | 29.16 | 29.39 | 41.98 | 35.69 |
| 42146 | 42236 | | | | | | | | | |
| WV- | WV- | 33.54 | 22.46 | 28.00 | 46.05 | 35.85 | 40.95 | 57.80 | 66.47 | 62.13 |
| 42147 | 42237 | | | | | | | | | |
| WV- | WV- | 25.21 | 22.28 | 23.75 | 48.93 | 29.97 | 39.45 | 44.03 | 37.53 | 40.78 |
| 42148 | 42238 | | | | | | | | | |
| WV- | WV- | 45.67 | 41.79 | 43.73 | 58.41 | 65.87 | 62.14 | 59.87 | 63.86 | 61.87 |
| 42149 | 42239 | | | | | | | | | |
| WV- | WV- | 61.28 | 40.91 | 51.10 | 80.92 | 65.54 | 73.23 | 70.75 | 75.99 | 73.37 |
| 42150 | 42240 | | | | | | | | | |
| WV- | WV- | 45.54 | 35.91 | 40.72 | 59.86 | 76.33 | 68.09 | 64.54 | 49.22 | 56.88 |
| 42151 | 42241 | | | | | | | | | |
| WV- | WV- | 52.21 | 104.97 | 78.59 | 77.21 | 64.12 | 70.66 | 65.83 | 76.66 | 71.25 |
| 42152 | 42242 | | | | | | | | | |
| WV- | WV- | 53.77 | 20.02 | 36.89 | 66.30 | 55.01 | 60.66 | 53.93 | 58.93 | 56.43 |
| 42153 | 42243 | | | | | | | | | |
| WV- | WV- | 51.46 | 41.43 | 46.45 | 65.60 | 69.19 | 67.39 | 75.45 | 73.39 | 74.42 |
| 42154 | 42244 | | | | | | | | | |
| WV- | WV- | 52.58 | 31.10 | 41.84 | 76.42 | 68.58 | 72.50 | 66.43 | 85.48 | 75.95 |
| 42155 | 42245 | | | | | | | | | |
| WV- | WV- | 52.87 | 43.66 | 48.26 | 67.81 | 69.47 | 68.64 | 79.86 | 80.66 | 80.26 |
| 42156 | 42246 | | | | | | | | | |
| WV- | WV- | 59.58 | 28.56 | 44.07 | 70.38 | 57.86 | 64.12 | 52.67 | 52.61 | 52.64 |
| 42157 | 42247 | | | | | | | | | |
| WV- | WV- | 50.77 | 29.03 | 39.90 | 56.09 | 57.02 | 56.55 | 62.85 | 66.53 | 64.69 |
| 42158 | 42248 | | | | | | | | | |
| WV- | WV- | 48.14 | 26.70 | 37.42 | 73.62 | 64.32 | 68.97 | 59.52 | 64.29 | 61.90 |
| 42159 | 42249 | | | | | | | | | |
| WV- | WV- | 49.76 | 47.70 | 48.73 | 57.23 | 59.48 | 58.36 | 65.75 | 66.81 | 66.28 |
| 42160 | 42250 | | | | | | | | | |
| WV- | WV- | 49.04 | 43.06 | 46.05 | 70.40 | 55.65 | 63.03 | 58.82 | 69.81 | 64.31 |
| 42161 | 42251 | | | | | | | | | |
| WV- | WV- | 52.58 | 31.44 | 42.01 | 64.50 | 55.02 | 59.76 | 58.06 | 81.86 | 69.96 |
| 42162 | 42252 | | | | | | | | | |
| WV- | WV- | 37.95 | 33.22 | 35.59 | 58.53 | 71.43 | 64.98 | 49.50 | 52.81 | 51.15 |
| 42163 | 42253 | | | | | | | | | |
| WV- | WV- | 57.27 | 26.61 | 41.94 | 48.36 | 55.74 | 52.05 | 60.29 | 73.70 | 66.99 |
| 42164 | 42254 | | | | | | | | | |
| WV- | WV- | 48.50 | 42.17 | 45.33 | 68.28 | 70.18 | 69.23 | 58.55 | 76.30 | 67.43 |
| 42165 | 42255 | | | | | | | | | |
| WV- | WV- | 52.40 | 41.00 | 46.70 | 87.62 | 67.12 | 77.37 | 75.79 | 49.89 | 62.84 |
| 42166 | 42256 | | | | | | | | | |
| WV- | WV- | 67.61 | 46.91 | 57.26 | 70.13 | 66.61 | 68.37 | 58.56 | 59.22 | 58.89 |
| 42167 | 42257 | | | | | | | | | |
| WV- | WV- | 52.20 | 28.59 | 40.39 | 55.08 | 61.28 | 58.18 | 80.46 | 81.27 | 80.86 |
| 42168 | 42258 | | | | | | | | | |
| WV- | WV- | 44.01 | 39.06 | 41.54 | 60.07 | 54.72 | 57.40 | 57.40 | 57.26 | 57.33 |
| 42169 | 42259 | | | | | | | | | |
| WV- | WV- | 61.05 | 45.98 | 53.52 | 72.79 | 67.03 | 69.91 | 53.81 | 75.53 | 64.67 |
| 42170 | 42260 | | | | | | | | | |
| WV- | WV- | 59.20 | 49.91 | 54.55 | 82.89 | 80.25 | 81.57 | 53.44 | 68.47 | 60.95 |
| 42171 | 42261 | | | | | | | | | |
| WV- | WV- | 56.18 | 51.53 | 53.85 | 92.25 | 72.05 | 82.15 | 71.82 | 99.78 | 85.80 |
| 42172 | 42262 | | | | | | | | | |
| WV- | WV- | 45.65 | 47.95 | 46.80 | 71.41 | 79.69 | 75.55 | 53.34 | 68.14 | 60.74 |
| 42173 | 42263 | | | | | | | | | |
| WV- | WV- | 51.60 | 36.29 | 43.94 | 69.42 | 65.90 | 67.66 | 57.36 | 65.94 | 61.65 |
| 42174 | 42264 | | | | | | | | | |
| WV- | WV- | 48.24 | 27.30 | 37.77 | 60.34 | 62.74 | 61.54 | 62.51 | 52.38 | 57.44 |
| 42175 | 42265 | | | | | | | | | |
| WV- | WV- | 43.91 | 41.45 | 42.68 | 62.89 | 72.80 | 67.85 | 66.11 | 74.87 | 70.49 |
| 42176 | 42266 | | | | | | | | | |
| WV- | WV- | 40.17 | 34.33 | 37.25 | 71.39 | 62.15 | 66.77 | 49.82 | 56.20 | 53.01 |
| 42177 | 42267 | | | | | | | | | |
| WV- | WV- | 66.35 | 37.53 | 51.94 | 74.79 | 71.69 | 73.24 | 66.62 | 58.59 | 62.60 |
| 42178 | 42268 | | | | | | | | | |
| WV- | WV- | 43.48 | 35.79 | 39.64 | 61.14 | 54.84 | 57.99 | 63.43 | 63.37 | 63.40 |
| 42179 | 42269 | | | | | | | | | |
| WV- | WV- | 61.53 | 40.84 | 51.19 | 75.88 | 65.13 | 70.51 | 78.48 | 99.95 | 89.21 |
| 42180 | 42270 | | | | | | | | | |
| WV- | WV- | 54.82 | 24.96 | 39.89 | 84.30 | 87.09 | 85.69 | 105.62 | 114.65 | 110.14 |
| 42181 | 42271 | | | | | | | | | |
| WV- | WV- | 58.50 | 34.97 | 46.74 | 49.17 | 59.56 | 54.36 | 67.07 | 67.47 | 67.27 |
| 42182 | 42272 | | | | | | | | | |
| WV- | WV- | 50.15 | 19.65 | 34.90 | 57.00 | 60.44 | 58.72 | 56.37 | 60.48 | 58.42 |
| 42183 | 42273 | | | | | | | | | |
| WV- | WV- | 53.79 | 42.47 | 48.13 | 64.59 | 66.32 | 65.45 | 57.23 | 59.65 | 58.44 |
| 42184 | 42274 | | | | | | | | | |
| WV- | WV- | 48.67 | 37.16 | 42.91 | 75.33 | 45.13 | 60.23 | 45.48 | 65.42 | 55.45 |
| 42185 | 42275 | | | | | | | | | |
| WV- | WV- | 76.70 | 50.69 | 63.70 | 93.39 | 77.79 | 85.59 | 87.22 | 106.07 | 96.64 |
| 42186 | 42276 | | | | | | | | | |
| WV- | WV- | 65.32 | 47.32 | 56.32 | 62.65 | 75.07 | 68.86 | 81.79 | 86.23 | 84.01 |
| 42187 | 42277 | | | | | | | | | |
| WV- | WV- | 54.10 | 38.38 | 46.24 | 68.39 | 65.03 | 66.71 | 69.17 | 81.00 | 75.09 |
| 42188 | 42278 | | | | | | | | | |
| WV- | WV- | 61.25 | 27.80 | 44.52 | 82.77 | 79.38 | 81.08 | 69.27 | 97.33 | 83.30 |
| 42189 | 42279 | | | | | | | | | |
| WV- | WV- | 55.42 | 28.54 | 41.98 | 80.61 | 76.59 | 78.60 | 54.27 | 66.93 | 60.60 |
| 42190 | 42280 | | | | | | | | | |
| WV- | WV- | 51.43 | 38.58 | 45.00 | 58.06 | 55.70 | 56.88 | 65.34 | 61.23 | 63.29 |
| 42191 | 42281 | | | | | | | | | |
| WV- | WV- | 51.79 | 32.08 | 41.93 | 64.43 | 57.80 | 61.11 | 66.94 | 73.91 | 70.43 |
| 42192 | 42282 | | | | | | | | | |
| WV- | WV- | 42.50 | 33.38 | 37.94 | 74.32 | 75.22 | 74.77 | 65.70 | 63.35 | 64.52 |
| 42193 | 42283 | | | | | | | | | |
| WV- | WV- | 57.64 | 41.90 | 49.77 | 62.57 | 62.98 | 62.77 | 62.07 | 60.72 | 61.39 |
| 42194 | 42284 | | | | | | | | | |
| WV- | WV- | 49.79 | 32.25 | 41.02 | 65.16 | 83.13 | 74.15 | 56.73 | 61.66 | 59.20 |
| 42195 | 42285 | | | | | | | | | |
| WV- | WV- | 59.93 | 40.69 | 50.31 | 59.61 | 57.21 | 58.41 | 54.53 | 72.47 | 63.50 |
| 42196 | 42286 | | | | | | | | | |
| WV- | WV- | 58.06 | 39.03 | 48.55 | 64.87 | 56.77 | 60.82 | 91.87 | 81.05 | 86.46 |
| 42197 | 42287 | | | | | | | | | |
| WV- | WV- | 63.16 | 50.05 | 56.61 | 78.06 | 78.80 | 78.43 | 66.88 | 64.96 | 65.92 |
| 42198 | 42288 | | | | | | | | | |
| WV- | WV- | 46.16 | 31.59 | 38.87 | 77.46 | 55.35 | 66.41 | 39.74 | 58.82 | 49.28 |
| 42199 | 42289 | | | | | | | | | |
| WV- | WV- | 43.30 | 27.99 | 35.65 | 61.50 | 48.84 | 55.17 | 79.36 | 65.62 | 72.49 |
| 42200 | 42290 | | | | | | | | | |
| WV- | WV- | 49.83 | 41.79 | 45.81 | 65.57 | 60.32 | 62.94 | 59.49 | 54.36 | 56.93 |
| 42201 | 42291 | | | | | | | | | |
| WV- | WV- | 53.97 | 48.39 | 51.18 | 60.85 | 42.93 | 51.89 | 63.96 | 73.19 | 68.58 |
| 42202 | 42292 | | | | | | | | | |
| WV- | WV- | 54.49 | 46.70 | 50.59 | 68.01 | 67.34 | 67.68 | 61.22 | 57.62 | 59.42 |
| 42203 | 42293 | | | | | | | | | |
| WV- | WV- | 48.47 | 47.65 | 48.06 | 62.30 | 65.85 | 64.08 | 59.92 | 61.17 | 60.55 |
| 42204 | 42294 | | | | | | | | | |
| WV- | WV- | 54.35 | 42.48 | 48.41 | 67.90 | 54.66 | 61.28 | 59.66 | 60.79 | 60.22 |
| 42205 | 42295 | | | | | | | | | |
| WV- | WV- | 59.66 | 49.79 | 54.72 | 70.88 | 69.94 | 70.41 | 70.98 | 64.93 | 67.95 |
| 42206 | 42296 | | | | | | | | | |
| WV- | WV- | 42.45 | 27.93 | 35.19 | 92.31 | 48.19 | 70.25 | 57.52 | 54.11 | 55.82 |
| 42207 | 42297 | | | | | | | | | |
| WV- | WV- | 56.80 | 40.44 | 48.62 | 64.22 | 64.62 | 64.42 | 57.42 | 82.20 | 69.81 |
| 42208 | 42298 | | | | | | | | | |
| WV- | WV- | 70.38 | 42.01 | 56.20 | 75.39 | 79.92 | 77.65 | 80.46 | 97.28 | 88.87 |
| 42209 | 42299 | | | | | | | | | |
| WV- | WV- | 57.41 | 36.84 | 47.13 | 79.11 | 86.13 | 82.62 | 62.32 | 56.12 | 59.22 |
| 42210 | 42300 | | | | | | | | | |
| WV- | WV- | 69.63 | 57.75 | 63.69 | 115.63 | 117.76 | 116.70 | 111.23 | 112.74 | 111.98 |
| 42211 | 42301 | | | | | | | | | |
| WV- | WV- | 55.90 | 36.39 | 46.15 | 77.88 | 52.75 | 65.31 | 52.58 | 66.17 | 59.37 |
| 42212 | 42302 | | | | | | | | | |
| WV- | WV- | 70.01 | 33.10 | 51.56 | 72.13 | 67.94 | 70.04 | 98.59 | 106.17 | 102.38 |
| 42213 | 42303 | | | | | | | | | |
| WV- | WV- | 32.81 | 46.49 | 39.65 | 75.37 | 60.16 | 67.76 | 62.22 | 56.80 | 59.51 |
| 42214 | 42304 | | | | | | | | | |
| WV- | WV- | 53.92 | 42.67 | 48.29 | 65.13 | 57.07 | 61.10 | 56.95 | 58.98 | 57.96 |
| 42215 | 42305 | | | | | | | | | |
| WV- | WV- | 57.20 | 32.27 | 44.73 | 87.57 | 63.49 | 75.53 | 51.78 | 54.90 | 53.34 |
| 42216 | 42306 | | | | | | | | | |
| WV- | WV- | 45.86 | 43.05 | 44.46 | 66.75 | 55.81 | 61.28 | 53.70 | 73.52 | 63.61 |
| 42217 | 42307 | | | | | | | | | |
| WV- | WV- | 62.78 | 65.79 | 64.29 | 108.87 | 87.57 | 98.22 | 87.49 | 100.52 | 94.01 |
| 42218 | 42308 | | | | | | | | | |

[1031] Table 6 shows % NHP HSD17B13 nmRNA remaining (at 10 and 1 nM by transfection) relative to NHP SFRS9 control. N=2. N.D.: Not determined.

TABLE 6

| | | 10 nM | | | 1 nM | | |
|---|---|---|---|---|---|---|---|
| | | % remaining | % remaining | | % remaining | % remaining | |
| | | mRNA | mRNA | | mRNA | mRNA | |
| | | (MfHSD17B13/ | (MfHSD17B13/ | | (MfHSD17B13/ | (MfHSD17B13/ | |
| Guide | Passenger | MfSFRS9)-1 | MfSFRS9)-2 | Mean | MfSFRS9)-1 | MfSFRS9)-2 | Mean |
| WV-42145 | WV-42235 | 5.18 | 4.79 | 4.98 | 11.47 | 8.28 | 9.88 |
| WV-42146 | WV-42236 | 4.16 | N.D. | 4.16 | 11.00 | 10.77 | 10.88 |
| WV-42147 | WV-42237 | 7.24 | 33.16 | 20.20 | 12.75 | 20.17 | 16.46 |
| WV-42148 | WV-42238 | N.D. | 10.28 | 10.28 | 12.19 | 9.05 | 10.62 |
| WV-42149 | WV-42239 | 12.57 | 15.90 | 14.24 | 73.37 | 16.81 | 45.09 |
| WV-42150 | WV-42240 | 39.47 | 24.51 | 31.99 | 45.29 | 35.26 | 40.28 |
| WV-42151 | WV-42241 | 6.32 | 17.58 | 11.95 | 20.23 | 40.42 | 30.32 |
| WV-42152 | WV-42242 | 11.85 | 13.26 | 12.56 | 22.65 | 70.59 | 46.62 |
| WV-42153 | WV-42243 | N.D. | 9.59 | 9.59 | 8.98 | 13.82 | 11.40 |
| WV-42154 | WV-42244 | 7.51 | 15.52 | 11.51 | 16.52 | 8.51 | 12.51 |
| WV-42155 | WV-42245 | 16.05 | 13.72 | 14.89 | 92.91 | N.D. | 92.91 |
| WV-42156 | WV-42246 | 4.58 | 23.20 | 13.89 | 20.75 | 80.74 | 50.75 |
| WV-42157 | WV-42247 | N.D. | 14.25 | 14.25 | 28.72 | 7.46 | 18.09 |
| WV-42158 | WV-42248 | 11.37 | 17.03 | 14.20 | 30.25 | 13.52 | 21.88 |
| WV-42159 | WV-42249 | 16.07 | 27.77 | 21.92 | 18.77 | 32.62 | 25.69 |
| WV-42160 | WV-42250 | 4.94 | 23.46 | 14.20 | 20.03 | 33.23 | 26.63 |
| WV-42161 | WV-42251 | 9.54 | 6.40 | 7.97 | 24.23 | 8.78 | 16.50 |
| WV-42162 | WV-42252 | 14.73 | 40.81 | 27.77 | 38.95 | 46.71 | 42.83 |
| WV-42163 | WV-42253 | 6.90 | 12.10 | 9.50 | 24.67 | 28.49 | 26.58 |
| WV-42164 | WV-42254 | 8.11 | 14.26 | 11.18 | 23.71 | 13.90 | 18.81 |
| WV-42165 | WV-42255 | 20.77 | 24.20 | 22.48 | 29.09 | 16.25 | 22.67 |
| WV-42166 | WV-42256 | 17.77 | 27.11 | 22.44 | 29.93 | 45.16 | 37.55 |
| WV-42167 | WV-42257 | 19.02 | 36.58 | 27.80 | 62.11 | 75.34 | 68.73 |
| WV-42168 | WV-42258 | 7.85 | 18.84 | 13.34 | 17.12 | 35.25 | 26.18 |
| WV-42169 | WV-42259 | 16.94 | 40.67 | 28.80 | 52.76 | 15.40 | 34.08 |
| WV-42170 | WV-42260 | 26.92 | 17.99 | 22.45 | 55.68 | 34.83 | 45.25 |
| WV-42171 | WV-42261 | 27.30 | 31.09 | 29.20 | 60.64 | 27.54 | 44.09 |
| WV-42172 | WV-42262 | 17.61 | 37.26 | 27.44 | 44.42 | 22.19 | 33.31 |
| WV-42173 | WV-42263 | 15.60 | 18.13 | 16.86 | 32.59 | 26.09 | 29.34 |
| WV-42174 | WV-42264 | 41.13 | 17.01 | 29.07 | 65.85 | 25.55 | 45.70 |
| WV-42175 | WV-42265 | 8.13 | 6.88 | 7.50 | 48.28 | 130.53 | 89.40 |
| WV-42176 | WV-42266 | 24.43 | 7.49 | 15.96 | 47.50 | 24.27 | 35.88 |
| WV-42177 | WV-42267 | 6.25 | 13.54 | 9.90 | 18.72 | 29.71 | 24.22 |
| WV-42178 | WV-42268 | 8.61 | 12.23 | 10.42 | 20.59 | 19.03 | 19.81 |
| WV-42179 | WV-42269 | 4.66 | 7.31 | 5.99 | 23.19 | 38.94 | 31.07 |
| WV-42180 | WV-42270 | 11.60 | 24.47 | 18.04 | 72.02 | N.D. | 72.02 |
| WV-42181 | WV-42271 | 18.30 | 24.12 | 21.21 | 83.65 | 24.31 | 53.98 |
| WV-42182 | WV-42272 | 6.49 | 24.18 | 15.33 | 81.16 | 11.92 | 46.54 |
| WV-42183 | WV-42273 | 8.87 | 10.15 | 9.51 | 30.34 | 21.67 | 26.00 |
| WV-42184 | WV-42274 | 12.73 | N.D. | 12.73 | 28.01 | 24.23 | 26.12 |
| WV-42185 | WV-42275 | 12.94 | 26.11 | 19.53 | 36.73 | 12.13 | 24.43 |
| WV-42186 | WV-42276 | 22.23 | 34.28 | 28.25 | 41.48 | 32.94 | 37.21 |
| WV-42187 | WV-42277 | 23.39 | 11.04 | 17.22 | 24.37 | 22.26 | 23.32 |
| WV-42188 | WV-42278 | 27.45 | 13.54 | 20.49 | 26.94 | 42.11 | 34.52 |
| WV-42189 | WV-42279 | 30.43 | 23.96 | 27.19 | 55.09 | 10.98 | 33.03 |
| WV-42190 | WV-42280 | 70.31 | 19.61 | 44.96 | 88.41 | 14.95 | 51.68 |
| WV-42191 | WV-42281 | 7.71 | N.D. | 7.71 | 19.10 | 17.88 | 18.49 |
| WV-42192 | WV-42282 | 7.57 | N.D. | 7.57 | 13.06 | 13.11 | 13.08 |
| WV-42193 | WV-42283 | N.D. | 10.46 | 10.46 | 25.36 | 27.12 | 26.24 |
| WV-42194 | WV-42284 | 18.31 | 21.65 | 19.98 | 14.98 | 14.15 | 14.57 |
| WV-42195 | WV-42285 | 18.49 | 18.59 | 18.54 | 11.57 | 19.54 | 15.56 |
| WV-42196 | WV-42286 | 13.19 | 21.69 | 17.44 | 27.48 | 36.42 | 31.95 |
| WV-42197 | WV-42287 | 8.96 | 9.36 | 9.16 | 19.42 | 14.38 | 16.90 |
| WV-42198 | WV-42288 | 13.37 | 30.72 | 22.05 | 44.61 | 25.90 | 35.26 |
| WV-42199 | WV-42289 | 15.25 | 37.61 | 26.43 | 29.02 | 18.78 | 23.90 |
| WV-42200 | WV-42290 | 7.75 | 16.28 | 12.01 | 17.48 | 14.33 | 15.90 |
| WV-42201 | WV-42291 | 13.07 | 10.76 | 11.92 | 10.12 | 10.07 | 10.09 |
| WV-42202 | WV-42292 | 17.04 | 28.88 | 22.96 | 21.13 | 26.38 | 23.76 |
| WV-42203 | WV-42293 | 15.27 | 33.51 | 24.39 | 20.60 | 18.69 | 19.65 |
| WV-42204 | WV-42294 | 26.34 | 26.54 | 26.44 | 19.49 | 25.05 | 22.27 |
| WV-42205 | WV-42295 | 15.36 | 34.90 | 25.13 | 41.71 | 13.70 | 27.71 |
| WV-42206 | WV-42296 | 12.07 | 45.29 | 28.68 | 43.05 | 16.65 | 29.85 |
| WV-42207 | WV-42297 | 22.45 | 27.73 | 25.09 | 42.96 | 13.78 | 28.37 |
| WV-42208 | WV-42298 | 9.22 | 4.63 | 6.92 | 20.04 | 37.66 | 28.85 |
| WV-42209 | WV-42299 | 46.31 | 48.58 | 47.44 | 28.08 | 24.69 | 26.39 |
| WV-42210 | WV-42300 | 10.36 | 27.63 | 18.99 | 37.21 | 16.71 | 26.96 |
| WV-42211 | WV-42301 | 43.68 | 47.87 | 45.78 | 39.72 | 47.94 | 43.83 |
| WV-42212 | WV-42302 | 65.88 | 28.28 | 47.08 | 26.37 | 30.73 | 28.55 |
| WV-42213 | WV-42303 | 24.50 | 19.83 | 22.16 | 24.76 | 35.64 | 30.20 |
| WV-42214 | WV-42304 | 46.32 | 28.99 | 37.65 | 35.05 | 23.93 | 29.49 |
| WV-42215 | WV-42305 | N.D. | N.D. | N.D. | 36.49 | 22.34 | 29.41 |
| WV-42216 | WV-42306 | 30.32 | N.D. | 30.32 | 30.86 | 68.94 | 49.90 |
| WV-42217 | WV-42307 | 11.23 | 29.34 | 20.28 | 11.32 | 16.60 | 13.96 |
| WV-42218 | WV-42308 | 91.69 | 87.99 | 89.84 | 100.42 | 68.20 | 84.31 |

[1032] Table 7 shows % human HSD17B13 miRNA remaining (at 30 and 10 nM by gymnotic delivery) relative to human SFRS9 control. N=2. N.D.: Not determined.

TABLE 7

| | | 30 nM | | | 10 nM | | |
|---|---|---|---|---|---|---|---|
| | | % remaining | % remaining | | % remaining | % remaining | |
| | | mRNA | mRNA | | mRNA | mRNA | |
| | | (hHSD17B13/ | (hHSD17B13/ | | (hHSD17B13/ | (hHSD17B13/ | |
| Guide | Passenger | hSFRS9)-1 | hSFRS9)-2 | Mean | hSFRS9)-1 | hSFRS9)-2 | Mean |
| WV-42354 | WV-42531 | 46.21 | 44.83 | 45.52 | 76.13 | 73.46 | 74.79 |
| WV-42355 | WV-42532 | 57.13 | 65.92 | 61.52 | 68.63 | 73.22 | 70.92 |
| WV-42356 | WV-42533 | 28.47 | 33.71 | 31.09 | 55.11 | 52.57 | 53.84 |
| WV-42357 | WV-42534 | 34.23 | 51.11 | 42.67 | 71.40 | 54.62 | 63.01 |
| WV-42358 | WV-42535 | 44.99 | 53.10 | 49.04 | 81.73 | 64.41 | 73.07 |
| WV-42359 | WV-42536 | 50.03 | 55.59 | 52.81 | 77.51 | 77.92 | 77.72 |
| WV-42360 | WV-42537 | 54.55 | 75.02 | 64.79 | 98.69 | 75.46 | 87.08 |
| WV-42361 | WV-42538 | 37.79 | N.D. | 37.79 | 65.95 | 61.24 | 63.60 |
| WV-42362 | WV-42539 | 48.24 | 49.66 | 48.95 | 64.97 | 54.78 | 59.88 |
| WV-42363 | WV-42540 | 48.91 | 41.53 | 45.22 | 61.48 | 55.93 | 58.71 |
| WV-42364 | WV-42541 | 45.24 | 49.78 | 47.51 | 66.77 | 71.74 | 69.26 |
| WV-42365 | WV-42542 | 71.19 | 96.01 | 83.60 | 93.81 | 106.47 | 100.14 |
| WV-42366 | WV-42543 | 29.14 | 42.61 | 35.87 | 68.66 | 51.66 | 60.16 |
| WV-42367 | WV-42544 | 68.59 | 84.38 | 76.48 | 98.97 | 93.58 | 96.27 |
| WV-42368 | WV-42545 | 74.76 | 149.27 | 112.01 | 95.82 | 102.58 | 99.20 |
| WV-42369 | WV-42546 | 49.11 | 63.25 | 56.18 | 75.43 | 66.22 | 70.82 |
| WV-42370 | WV-42547 | 71.07 | 55.73 | 63.40 | 79.73 | 86.04 | 82.88 |
| WV-42371 | WV-42548 | 69.60 | 80.65 | 75.13 | 113.14 | 80.24 | 96.69 |
| WV-42372 | WV-42549 | 43.55 | 67.89 | 55.72 | 87.05 | 76.35 | 81.70 |
| WV-42373 | WV-42550 | 46.72 | 58.04 | 52.38 | 79.63 | 78.67 | 79.15 |
| WV-42374 | WV-42551 | 44.34 | 61.24 | 52.79 | 92.60 | 88.92 | 90.76 |
| WV-42375 | WV-42552 | 61.12 | 55.16 | 58.14 | 88.06 | 98.39 | 93.23 |
| WV-42376 | WV-42553 | 59.98 | 73.55 | 66.76 | 78.30 | 92.07 | 85.18 |
| WV-42377 | WV-42554 | 57.78 | 67.41 | 62.60 | 81.75 | 85.85 | 83.80 |
| WV-42378 | WV-42555 | 79.81 | 80.74 | 80.28 | 93.82 | 81.17 | 87.50 |
| WV-42379 | WV-42556 | 83.26 | 94.81 | 89.04 | 100.41 | 92.05 | 96.23 |
| WV-42380 | WV-42557 | 48.44 | 71.59 | 60.02 | 84.19 | 71.42 | 77.81 |
| WV-42381 | WV-42558 | 22.39 | 29.39 | 25.89 | 52.79 | 56.88 | 54.84 |
| WV-42382 | WV-42559 | 30.88 | 36.73 | 33.80 | 60.99 | 53.12 | 57.06 |
| WV-42383 | WV-42560 | 41.01 | 52.10 | 46.56 | 82.11 | 66.04 | 74.08 |
| WV-42384 | WV-42561 | 90.03 | 110.43 | 100.23 | 97.81 | 78.65 | 88.23 |
| WV-42385 | WV-42562 | 44.13 | 52.21 | 48.17 | 81.90 | 66.79 | 74.35 |
| WV-42386 | WV-42563 | 71.63 | 84.42 | 78.02 | 105.49 | 92.11 | 98.80 |
| WV-42387 | WV-42564 | 71.03 | 79.58 | 75.31 | 84.24 | 71.55 | 77.89 |
| WV-42388 | WV-42565 | 60.79 | 66.39 | 63.59 | 84.32 | 100.05 | 92.18 |
| WV-42389 | WV-42566 | 51.58 | 71.73 | 61.65 | 94.36 | 60.03 | 77.19 |
| WV-42390 | WV-42567 | 55.50 | 60.34 | 57.92 | 80.96 | 65.75 | 73.36 |
| WV-42391 | WV-42568 | 44.36 | 57.01 | 50.68 | 82.64 | 59.38 | 71.01 |
| WV-42392 | WV-42569 | 50.61 | 56.42 | 53.51 | 72.32 | 71.83 | 72.07 |
| WV-42393 | WV-42570 | 39.83 | 64.12 | 51.98 | 79.48 | 68.81 | 74.14 |
| WV-42394 | WV-42571 | 58.38 | 64.52 | 61.45 | 101.64 | 77.35 | 89.50 |
| WV-42395 | WV-42572 | 44.84 | 54.07 | 49.46 | 76.19 | 61.17 | 68.68 |
| WV-42396 | WV-42573 | 67.89 | 69.75 | 68.82 | 77.62 | 60.91 | 69.26 |
| WV-42397 | WV-42574 | 74.96 | 72.18 | 73.57 | 83.87 | 71.84 | 77.85 |

[1033] Table 8 shows % human HSD17B13 mRNA remaining (at 300, 100 and 30 nM by gymnotic delivery) relative to human SFRS9 control. N=2. N.D.: Not determined.

TABLE 8

| | | 300 nM | | | 100 nM | | | 30 nM | | |
|---|---|---|---|---|---|---|---|---|---|---|
| | | % remaining | % remaining | | % remaining | % remaining | | % remaining | % remaining | |
| | | mRNA | mRNA | | mRNA | mRNA | | mRNA | mRNA | |
| | | (hHSD17B13/ | (hHSD17B13/ | | (hHSD17B13/ | (hHSD17B13/ | | (hHSD17B13/ | (hHSD17B13/ | |
| Guide | Passenger | hSFRS9)-1 | hSFRS9)-2 | Mean | hSFRS9)-1 | hSFRS9)-2 | Mean | hSFRS9)-1 | hSFRS9)-2 | Mean |
| WV- | WV- | 37.75 | 36.31 | 37.03 | 41.91 | 43.79 | 42.85 | 99.14 | 95.30 | 97.22 |
| 43130 | 43175 | | | | | | | | | |
| WV- | WV- | 56.59 | 44.60 | 50.60 | 61.20 | 56.11 | 58.65 | 99.44 | 105.79 | 102.62 |
| 43131 | 43176 | | | | | | | | | |
| WV- | WV- | 53.84 | 59.77 | 56.80 | 54.25 | 56.05 | 55.15 | 123.03 | 126.48 | 124.75 |
| 43132 | 43177 | | | | | | | | | |
| WV- | WV- | 41.34 | 51.18 | 46.26 | 47.54 | 54.91 | 51.23 | 95.30 | 106.66 | 100.98 |
| 43133 | 43178 | | | | | | | | | |
| WV- | WV- | 21.57 | 31.44 | 26.51 | 28.96 | 55.15 | 42.05 | 71.69 | 84.08 | 77.88 |
| 43134 | 43179 | | | | | | | | | |
| WV- | WV- | 16.87 | 22.20 | 19.54 | 19.23 | 30.69 | 24.96 | 72.25 | 64.11 | 68.18 |
| 43135 | 43180 | | | | | | | | | |
| WV- | WV- | 8.73 | 13.73 | 11.23 | 30.51 | 24.05 | 27.28 | 61.88 | 66.49 | 64.19 |
| 43136 | 43181 | | | | | | | | | |
| WV- | WV- | 31.89 | 35.32 | 33.61 | N.D. | 47.79 | 47.79 | 77.72 | 88.84 | 83.28 |
| 43137 | 43182 | | | | | | | | | |
| WV- | WV- | 30.23 | 29.50 | 29.86 | 32.72 | 35.76 | 34.24 | 70.82 | 66.88 | 68.85 |
| 43138 | 43183 | | | | | | | | | |
| WV- | WV- | 48.61 | 38.02 | 43.31 | 37.10 | 53.79 | 45.45 | 98.63 | 87.24 | 92.94 |
| 43139 | 43184 | | | | | | | | | |
| WV- | WV- | 64.78 | 85.33 | 75.06 | 64.96 | 76.82 | 70.89 | 124.44 | 119.82 | 122.13 |
| 43140 | 43185 | | | | | | | | | |
| WV- | WV- | 69.88 | 75.51 | 72.70 | 73.59 | 72.11 | 72.85 | 113.66 | 146.84 | 130.25 |
| 43141 | 43186 | | | | | | | | | |
| WV- | WV- | 30.71 | 31.19 | 30.95 | 46.99 | 48.01 | 47.50 | 84.46 | 93.87 | 89.16 |
| 43142 | 43187 | | | | | | | | | |
| WV- | WV- | 42.01 | 47.31 | 44.66 | 44.71 | 48.99 | 46.85 | 94.41 | 89.19 | 91.80 |
| 43143 | 43188 | | | | | | | | | |
| WV- | WV- | 48.08 | 45.52 | 46.80 | 59.69 | 53.46 | 56.58 | 106.90 | 123.46 | 115.18 |
| 43144 | 43189 | | | | | | | | | |
| WV- | WV- | 34.13 | 32.85 | 33.49 | 40.37 | 59.48 | 49.92 | 51.18 | 81.86 | 66.52 |
| 43145 | 43190 | | | | | | | | | |
| WV- | WV- | 32.83 | 24.29 | 28.56 | 34.43 | 41.84 | 38.13 | 64.95 | 57.94 | 61.45 |
| 43146 | 43191 | | | | | | | | | |
| WV- | WV- | 37.04 | 37.26 | 37.15 | 40.97 | 44.73 | 42.85 | 80.60 | 82.11 | 81.36 |
| 43147 | 43192 | | | | | | | | | |
| WV- | WV- | 53.75 | 50.53 | 52.14 | 57.70 | 68.78 | 63.24 | 100.57 | 112.76 | 106.66 |
| 43148 | 43193 | | | | | | | | | |
| WV- | WV- | 54.11 | 56.02 | 55.07 | 70.09 | 63.62 | 66.86 | 108.71 | 92.14 | 100.43 |
| 43149 | 43194 | | | | | | | | | |
| WV- | WV- | 47.55 | 48.62 | 48.08 | 62.03 | 58.79 | 60.41 | 70.74 | 107.23 | 88.98 |
| 43150 | 43195 | | | | | | | | | |
| WV- | WV- | 35.13 | 37.62 | 36.38 | 29.52 | 42.59 | 36.05 | 62.44 | 67.77 | 65.11 |
| 43151 | 43196 | | | | | | | | | |
| WV- | WV- | 36.85 | 33.54 | 35.20 | 40.42 | 38.82 | 39.62 | 76.41 | 67.45 | 71.93 |
| 43152 | 43197 | | | | | | | | | |
| WV- | WV- | 27.81 | 35.13 | 31.47 | 37.65 | 36.46 | 37.05 | 70.99 | 51.42 | 61.21 |
| 43153 | 43198 | | | | | | | | | |
| WV- | WV- | 26.02 | 36.76 | 31.39 | 35.23 | 42.20 | 38.72 | 63.18 | 68.71 | 65.95 |
| 43154 | 43199 | | | | | | | | | |
| WV- | WV- | 56.51 | 48.30 | 52.41 | 53.34 | 57.28 | 55.31 | 82.64 | 92.66 | 87.65 |
| 43155 | 43200 | | | | | | | | | |
| WV- | WV- | 63.84 | 80.25 | 72.04 | 68.67 | 72.87 | 70.77 | 102.04 | 90.06 | 96.05 |
| 43156 | 43201 | | | | | | | | | |
| WV- | WV- | 32.70 | 31.77 | 32.23 | 33.54 | 42.09 | 37.82 | 67.36 | 61.70 | 64.53 |
| 43157 | 43202 | | | | | | | | | |
| WV- | WV- | 35.33 | 33.80 | 34.57 | 51.94 | 50.85 | 51.39 | 71.21 | 86.59 | 78.90 |
| 43158 | 43203 | | | | | | | | | |
| WV- | WV- | 60.49 | 67.21 | 63.85 | 81.62 | 72.51 | 77.07 | 93.93 | 112.26 | 103.10 |
| 43159 | 43204 | | | | | | | | | |
| WV- | WV- | 51.18 | 54.79 | 52.99 | 56.30 | 56.22 | 56.26 | 107.26 | 102.13 | 104.69 |
| 43160 | 43205 | | | | | | | | | |
| WV- | WV- | 54.28 | 48.76 | 51.52 | 60.05 | 61.90 | 60.98 | 100.55 | 94.99 | 97.77 |
| 43161 | 43206 | | | | | | | | | |
| WV- | WV- | 49.18 | 57.70 | 53.44 | 59.64 | 55.43 | 57.54 | 79.45 | 90.82 | 85.14 |
| 43162 | 43207 | | | | | | | | | |
| WV- | WV- | 31.34 | 35.61 | 33.47 | 55.35 | 60.65 | 58.00 | 78.51 | 85.56 | 82.04 |
| 43163 | 43208 | | | | | | | | | |
| WV- | WV- | 35.02 | 30.83 | 32.92 | 84.78 | 55.27 | 70.02 | 79.63 | 80.45 | 80.04 |
| 43164 | 43209 | | | | | | | | | |
| WV- | WV- | 62.40 | 68.19 | 65.29 | 74.40 | 81.15 | 77.78 | 96.77 | 96.93 | 96.85 |
| 43165 | 43210 | | | | | | | | | |
| WV- | WV- | 47.14 | 45.94 | 46.54 | 46.06 | 56.96 | 51.51 | 76.18 | 86.85 | 81.51 |
| 43166 | 43211 | | | | | | | | | |
| WV- | WV- | 34.59 | 44.70 | 39.64 | 41.94 | 44.44 | 43.19 | 64.97 | 64.75 | 64.86 |
| 43167 | 43212 | | | | | | | | | |
| WV- | WV- | 58.33 | 45.14 | 51.73 | 63.46 | 55.40 | 59.43 | 89.42 | 102.86 | 96.14 |
| 43168 | 43213 | | | | | | | | | |
| WV- | WV- | 40.36 | 54.62 | 47.49 | 59.95 | 63.63 | 61.79 | 95.54 | 93.76 | 94.65 |
| 43169 | 43214 | | | | | | | | | |
| WV- | WV- | 37.59 | 43.23 | 40.41 | 43.08 | 52.61 | 47.84 | 79.30 | 71.64 | 75.47 |
| 43170 | 43215 | | | | | | | | | |
| WV- | WV- | 32.92 | 27.25 | 30.08 | 42.62 | 37.38 | 40.00 | 56.41 | 82.36 | 69.38 |
| 43171 | 43216 | | | | | | | | | |
| WV- | WV- | 35.11 | 35.64 | 35.37 | 55.87 | 63.25 | 59.56 | N.D. | 77.93 | 77.93 |
| 43172 | 43217 | | | | | | | | | |
| WV- | WV- | 38.49 | 33.33 | 35.91 | 45.44 | 45.35 | 45.40 | 90.02 | 60.12 | 75.07 |
| 43173 | 43218 | | | | | | | | | |
| WV- | WV- | 36.48 | 40.15 | 38.31 | 50.67 | 51.20 | 50.94 | 72.33 | 76.71 | 74.52 |
| 43174 | 43219 | | | | | | | | | |

[1034] Table 9 shows % NHP HSD17B13 mRNA remaining (at 150 and 50 nM by gymnotic delivery) relative to NHP SFRS9 control. N=2. N.D.: Not determined.

TABLE 9

| | | 150 nM | | | 50 nM | | |
|---|---|---|---|---|---|---|---|
| | | % remaining | % remaining | | % remaining | % remaining | |
| | | mRNA | mRNA | | mRNA | mRNA | |
| | | (hHSD17B13/ | (hHSD17B13/ | | (hHSD17B13/ | (hHSD17B13/ | |
| Guide | Passenger | hSFRS9)-1 | hSFRS9)-2 | Mean | hSFRS9)-1 | hSFRS9)-2 | Mean |
| WV-43130 | WV-43175 | 67.45 | 70.16 | 68.80 | 44.51 | 66.47 | 55.49 |
| WV-43131 | WV-43176 | 84.31 | 106.44 | 95.37 | 60.98 | 107.62 | 84.30 |
| WV-43132 | WV-43177 | 64.37 | 73.76 | 69.07 | 87.59 | 89.67 | 88.63 |
| WV-43133 | WV-43178 | 61.69 | 63.06 | 62.37 | 73.40 | 73.43 | 73.42 |
| WV-43134 | WV-43179 | 41.59 | 48.80 | 45.19 | 59.98 | 63.14 | 61.56 |
| WV-43135 | WV-43180 | 44.68 | 32.98 | 38.83 | 34.87 | 56.19 | 45.53 |
| WV-43136 | WV-43181 | 18.37 | 22.23 | 20.30 | 22.36 | N.D. | 22.36 |
| WV-43137 | WV-43182 | 40.09 | 39.18 | 39.63 | 150.58 | 90.21 | 120.39 |
| WV-43138 | WV-43183 | 36.51 | 34.70 | 35.60 | 26.07 | 39.92 | 32.99 |
| WV-43139 | WV-43184 | 61.49 | 55.75 | 58.62 | 51.74 | 57.01 | 54.37 |
| WV-43140 | WV-43185 | 66.49 | 77.86 | 72.17 | 62.90 | 57.24 | 60.07 |
| WV-43141 | WV-43186 | 53.79 | 67.42 | 60.60 | 77.08 | 75.37 | 76.22 |
| WV-43142 | WV-43187 | 33.83 | 39.66 | 36.75 | 56.67 | 29.38 | 43.02 |
| WV-43143 | WV-43188 | 27.74 | 40.89 | 34.31 | 67.39 | 100.71 | 84.05 |
| WV-43144 | WV-43189 | 45.90 | 50.99 | 48.44 | 105.08 | 75.84 | 90.46 |
| WV-43145 | WV-43190 | 32.55 | 35.35 | 33.95 | 49.55 | 98.64 | 74.09 |
| WV-43146 | WV-43191 | 14.16 | 77.69 | 45.93 | 9.79 | 22.50 | 16.14 |
| WV-43147 | WV-43192 | 30.93 | 37.76 | 34.34 | 24.76 | 23.03 | 23.89 |
| WV-43148 | WV-43193 | 60.78 | 104.31 | 82.55 | 47.44 | 56.14 | 51.79 |
| WV-43149 | WV-43194 | 57.53 | 70.12 | 63.83 | 53.74 | 71.30 | 62.52 |
| WV-43150 | WV-43195 | 37.95 | 45.96 | 41.96 | 49.10 | 63.03 | 56.06 |
| WV-43151 | WV-43196 | 27.73 | 30.07 | 28.90 | 35.21 | 45.44 | 40.32 |
| WV-43152 | WV-43197 | 25.75 | 26.85 | 26.30 | 51.93 | 53.80 | 52.86 |
| WV-43153 | WV-43198 | 27.39 | 42.46 | 34.92 | 35.08 | 34.62 | 34.85 |
| WV-43154 | WV-43199 | 20.51 | 33.18 | 26.85 | 19.89 | 12.30 | 16.10 |
| WV-43155 | WV-43200 | 30.91 | 43.49 | 37.20 | 31.72 | 76.64 | 54.18 |
| WV-43156 | WV-43201 | 68.02 | 63.95 | 65.98 | 51.99 | 69.16 | 60.58 |
| WV-43157 | WV-43202 | 31.65 | 24.28 | 27.97 | 36.44 | 38.72 | 37.58 |
| WV-43158 | WV-43203 | 23.71 | 43.15 | 33.43 | 40.56 | 44.76 | 42.66 |
| WV-43159 | WV-43204 | 86.99 | 87.18 | 87.08 | 85.71 | 86.43 | 86.07 |
| WV-43160 | WV-43205 | 32.73 | 44.91 | 38.82 | 53.69 | 65.36 | 59.52 |
| WV-43161 | WV-43206 | 48.56 | 63.15 | 55.85 | 87.77 | 70.86 | 79.31 |
| WV-43162 | WV-43207 | 69.99 | 40.43 | 55.21 | 37.16 | 28.81 | 32.98 |
| WV-43163 | WV-43208 | 53.85 | 65.71 | 59.78 | 36.81 | 41.42 | 39.12 |
| WV-43164 | WV-43209 | 27.77 | 36.72 | 32.25 | 33.06 | 20.96 | 27.01 |
| WV-43165 | WV-43210 | 51.26 | 55.54 | 53.40 | 95.64 | 76.58 | 86.11 |
| WV-43166 | WV-43211 | 32.62 | 28.56 | 30.59 | 49.54 | 44.57 | 47.05 |
| WV-43167 | WV-43212 | 38.05 | 40.15 | 39.10 | 42.27 | 49.51 | 45.89 |
| WV-43168 | WV-43213 | 45.28 | 42.59 | 43.94 | 68.83 | 65.91 | 67.37 |
| WV-43169 | WV-43214 | 68.18 | 52.74 | 60.46 | 92.26 | 60.88 | 76.57 |
| WV-43170 | WV-43215 | 47.08 | 37.54 | 42.31 | 26.27 | 26.85 | 26.56 |
| WV-43171 | WV-43216 | 23.91 | 40.95 | 32.43 | 16.07 | 26.40 | 21.23 |
| WV-43172 | WV-43217 | 39.16 | 63.58 | 51.37 | 51.90 | 78.95 | 65.42 |
| WV-43173 | WV-43218 | 62.11 | 80.55 | 71.33 | 59.56 | 48.87 | 54.21 |
| WV-43174 | WV-43219 | 51.10 | 36.83 | 43.96 | 44.63 | 47.03 | 45.83 |

[1035] Table 10 shows % human HSD17B13 mRNA remaining (at 300, 100 and 30 nM by gymnotic delivery) relative to human SFRS9 control. N=2. N.D.: Not determined.

TABLE 10

| | | 300 nM | | | 100 nM | | | 30 nM | | |
|---|---|---|---|---|---|---|---|---|---|---|
| | | % remaining | % remaining | | % remaining | % remaining | | % remaining | % remaining | |
| | | mRNA | mRNA | | mRNA | mRNA | | mRNA | mRNA | |
| | | (hHSD17B13/ | (hHSD17B13/ | | (hHSD17B13/ | (hHSD17B13/ | | (hHSD17B13/ | (hHSD17B13/ | |
| Guide | Passenger | hSFRS9)-1 | hSFRS9)-2 | Mean | hSFRS9)-1 | hSFRS9)-2 | Mean | hSFRS9)-1 | hSFRS9)-2 | Mean |
| WV- | WV- | 40.50 | 36.28 | 38.39 | 65.94 | 73.42 | 69.68 | 96.15 | 65.15 | 80.65 |
| 42354 | 42531 | | | | | | | | | |
| WV- | WV- | 27.83 | 64.63 | 46.23 | 57.85 | 58.01 | 57.93 | 48.93 | 74.06 | 61.50 |
| 42355 | 42532 | | | | | | | | | |
| WV- | WV- | 29.10 | 30.71 | 29.91 | 43.63 | 32.91 | 38.27 | 65.74 | 57.29 | 61.51 |
| 42356 | 42533 | | | | | | | | | |
| WV- | WV- | 42.92 | 56.52 | 49.72 | 50.82 | 49.59 | 50.21 | 54.41 | 48.14 | 51.28 |
| 42357 | 42534 | | | | | | | | | |
| WV- | WV- | 48.17 | 55.00 | 51.59 | 57.86 | 59.63 | 58.75 | 38.57 | 43.38 | 40.97 |
| 42358 | 42535 | | | | | | | | | |
| WV- | WV- | 44.42 | 50.59 | 47.51 | 58.39 | 66.85 | 62.62 | 79.24 | 50.91 | 65.08 |
| 42359 | 42536 | | | | | | | | | |
| WV- | WV- | 37.87 | 42.81 | 40.34 | 58.31 | 36.62 | 47.46 | 90.89 | 67.38 | 79.13 |
| 42361 | 42538 | | | | | | | | | |
| WV- | WV- | 59.19 | 26.39 | 42.79 | N.D. | 43.95 | 43.95 | 58.61 | 57.74 | 58.17 |
| 42362 | 42539 | | | | | | | | | |
| WV- | WV- | 38.38 | 25.99 | 32.19 | 35.66 | 62.06 | 48.86 | 93.74 | 66.15 | 79.94 |
| 42363 | 42540 | | | | | | | | | |
| WV- | WV- | 49.50 | 29.44 | 39.47 | 48.63 | 57.90 | 53.26 | 38.35 | 48.48 | 43.41 |
| 42364 | 42541 | | | | | | | | | |
| WV- | WV- | 33.63 | 41.32 | 37.47 | 33.46 | 42.88 | 38.17 | 61.26 | 56.38 | 58.82 |
| 42366 | 42543 | | | | | | | | | |
| WV- | WV- | 25.34 | 33.23 | 29.28 | 49.54 | 66.37 | 57.96 | 65.06 | 68.56 | 66.81 |
| 42369 | 42546 | | | | | | | | | |
| WV- | WV- | 25.79 | 44.05 | 34.92 | 22.22 | 37.33 | 29.78 | 61.43 | 53.15 | 57.29 |
| 42373 | 42550 | | | | | | | | | |
| WV- | WV- | 18.72 | 12.94 | 15.83 | 26.64 | 47.49 | 37.06 | 43.36 | 49.69 | 46.52 |
| 42381 | 42558 | | | | | | | | | |
| WV- | WV- | 13.68 | 14.14 | 13.91 | 28.70 | 29.25 | 28.97 | 95.25 | 63.83 | 79.54 |
| 42382 | 42559 | | | | | | | | | |
| WV- | WV- | 21.11 | 12.32 | 16.71 | 104.70 | 39.11 | 71.90 | 47.95 | 35.04 | 41.50 |
| 42383 | 42560 | | | | | | | | | |
| WV- | WV- | 23.55 | 90.33 | 56.94 | 69.16 | 76.67 | 72.91 | 80.26 | 75.16 | 77.71 |
| 42385 | 42562 | | | | | | | | | |
| WV- | WV- | 67.25 | 51.32 | 59.28 | 51.50 | 80.98 | 66.24 | 78.68 | 68.34 | 73.51 |
| 42390 | 42567 | | | | | | | | | |
| WV- | WV- | 62.78 | 38.05 | 50.41 | 56.99 | 59.76 | 58.37 | 57.21 | 48.19 | 52.70 |
| 42391 | 42568 | | | | | | | | | |
| WV- | WV- | 38.67 | 27.40 | 33.04 | 54.19 | 39.75 | 46.97 | 44.31 | 75.77 | 60.04 |
| 42392 | 42569 | | | | | | | | | |
| WV- | WV- | 50.33 | 40.21 | 45.27 | 55.00 | 52.86 | 53.93 | 100.54 | 109.76 | 105.15 |
| 42393 | 42570 | | | | | | | | | |
| WV- | WV- | 43.11 | 32.82 | 37.97 | 60.12 | 47.32 | 53.72 | 62.18 | 66.81 | 64.50 |
| 42395 | 42572 | | | | | | | | | |
| WV- | WV- | 55.52 | 48.97 | 52.24 | 77.55 | 58.80 | 68.18 | 69.70 | 83.08 | 76.39 |
| 42396 | 42573 | | | | | | | | | |
| WV- | WV- | 59.30 | 41.45 | 50.38 | 35.57 | 40.01 | 37.79 | 62.29 | 73.79 | 68.04 |
| 43135 | 43180 | | | | | | | | | |
| WV- | WV- | 50.21 | 25.44 | 37.82 | 41.05 | 29.71 | 35.38 | 67.29 | 58.34 | 62.81 |
| 43136 | 43181 | | | | | | | | | |
| WV- | WV- | 85.37 | 53.15 | 69.26 | 61.84 | 57.36 | 59.60 | 77.63 | 71.30 | 74.46 |
| 43137 | 43182 | | | | | | | | | |
| WV- | WV- | 39.18 | 54.65 | 46.91 | 54.03 | 73.16 | 63.59 | 87.73 | 88.87 | 88.30 |
| 43138 | 43183 | | | | | | | | | |
| WV- | WV- | 62.43 | 68.92 | 65.68 | 70.35 | 86.71 | 78.53 | 68.50 | 104.64 | 86.57 |
| 43143 | 43188 | | | | | | | | | |
| WV- | WV- | 63.30 | 73.98 | 68.64 | 75.39 | 70.76 | 73.07 | 86.66 | 110.26 | 98.46 |
| 43145 | 43190 | | | | | | | | | |
| WV- | WV- | 44.44 | 51.65 | 48.04 | 59.91 | 56.48 | 58.19 | 66.02 | 81.43 | 73.72 |
| 43146 | 43191 | | | | | | | | | |
| WV- | WV- | 40.18 | 67.98 | 54.08 | 92.75 | 209.73 | 151.24 | 70.31 | 90.23 | 80.27 |
| 43147 | 43192 | | | | | | | | | |
| WV- | WV- | 61.50 | 51.94 | 56.72 | 50.31 | 52.78 | 51.54 | 64.61 | 62.99 | 63.80 |
| 43151 | 43196 | | | | | | | | | |
| WV- | WV- | 57.02 | 84.93 | 70.97 | 65.53 | 52.07 | 58.80 | 80.93 | 69.17 | 75.05 |
| 43152 | 43197 | | | | | | | | | |
| WV- | WV- | 61.48 | 79.92 | 70.70 | 65.67 | 73.11 | 69.39 | 84.22 | 59.23 | 71.72 |
| 43153 | 43198 | | | | | | | | | |
| WV- | WV- | 40.59 | 22.09 | 31.34 | 60.04 | 74.99 | 67.52 | 77.17 | 69.70 | 73.44 |
| 43154 | 43199 | | | | | | | | | |
| WV- | WV- | 47.49 | 80.49 | 63.99 | 81.73 | 64.53 | 73.13 | 81.59 | 146.21 | 113.90 |
| 43155 | 43200 | | | | | | | | | |
| WV- | WV- | 40.39 | 46.32 | 43.36 | 73.92 | 68.94 | 71.43 | 47.23 | 90.03 | 68.63 |
| 43157 | 43202 | | | | | | | | | |
| WV- | WV- | 35.95 | 34.02 | 34.98 | 90.00 | 82.83 | 86.41 | 59.51 | 53.94 | 56.73 |
| 43158 | 43203 | | | | | | | | | |
| WV- | WV- | 52.82 | 20.26 | 36.54 | 78.60 | 76.69 | 77.64 | 84.27 | 70.03 | 77.15 |
| 43164 | 43209 | | | | | | | | | |
| WV- | WV- | 73.23 | 52.70 | 62.97 | 79.02 | 63.73 | 71.37 | 109.46 | 100.94 | 105.20 |
| 43166 | 43211 | | | | | | | | | |
| WV- | WV- | 45.11 | 44.82 | 44.97 | 65.99 | 84.00 | 74.99 | 58.16 | 76.80 | 67.48 |
| 43167 | 43212 | | | | | | | | | |
| WV- | WV- | 26.59 | 111.76 | 69.17 | 79.65 | 87.61 | 83.63 | 67.67 | 77.77 | 72.72 |
| 43170 | 43215 | | | | | | | | | |
| WV- | WV- | 43.95 | 43.77 | 43.86 | 59.32 | 59.44 | 59.38 | 60.49 | 61.58 | 61.04 |
| 43171 | 43216 | | | | | | | | | |
| WV- | WV- | 54.55 | 41.37 | 47.96 | 110.49 | 63.83 | 87.16 | 77.80 | 80.23 | 79.01 |
| 43173 | 43218 | | | | | | | | | |
| WV- | WV- | 65.61 | 49.44 | 57.53 | 75.97 | 93.54 | 84.76 | 74.59 | 60.57 | 67.58 |
| 43174 | 43219 | | | | | | | | | |

[1036] Table 11 shows % NHP HSD17B13 mRNA remaining (at 150 and 50 nM by gymnotic delivery) relative to NHP SFRS9 control. N=2. N.D.: Not determined.

TABLE 11

| | | 150 nM | | | 50 nM | | |
|---|---|---|---|---|---|---|---|
| | | % remaining | % remaining | | % remaining | % remaining | |
| | | mRNA | mRNA | | mRNA | mRNA | |
| | | (hHSD17B13/ | (hHSD17B13/ | | (hHSD17B13/ | (hHSD17B13/ | |
| Guide | Passenger | hSFRS9)-1 | hSFRS9)-2 | Mean | hSFRS9)-1 | hSFRS9)-2 | Mean |
| WV-42354 | WV-42531 | 76.61 | 67.83 | 72.22 | 63.55 | 74.57 | 69.06 |
| WV-42355 | WV-42532 | 102.41 | 106.81 | 104.61 | 60.47 | 77.02 | 68.75 |
| WV-42356 | WV-42533 | 83.06 | 68.00 | 75.53 | 49.89 | 61.39 | 55.64 |
| WV-42357 | WV-42534 | 110.08 | 68.25 | 89.16 | 55.14 | 52.48 | 53.81 |
| WV-42358 | WV-42535 | 66.17 | 58.38 | 62.28 | 35.08 | 67.75 | 51.41 |
| WV-42359 | WV-42536 | 74.02 | 84.76 | 79.39 | 39.73 | 72.61 | 56.17 |
| WV-42361 | WV-42538 | 47.38 | 35.25 | 41.32 | 41.80 | 60.34 | 51.07 |
| WV-42362 | WV-42539 | 30.13 | 46.20 | 38.16 | 83.28 | 38.44 | 60.86 |
| WV-42363 | WV-42540 | 62.99 | 80.90 | 71.95 | 59.18 | 70.27 | 64.72 |
| WV-42364 | WV-42541 | 140.29 | 103.94 | 122.11 | 83.77 | 47.99 | 65.88 |
| WV-42366 | WV-42543 | 111.51 | 117.36 | 114.44 | 75.31 | 64.52 | 69.92 |
| WV-42369 | WV-42546 | 122.98 | 106.49 | 114.74 | 94.05 | 80.00 | 87.02 |
| WV-42373 | WV-42550 | N.D. | 101.56 | 101.56 | 68.19 | 72.61 | 70.40 |
| WV-42381 | WV-42558 | 58.45 | 44.25 | 51.35 | 78.70 | 49.40 | 64.05 |
| WV-42382 | WV-42559 | 64.41 | N.D. | 64.41 | 93.66 | 101.96 | 97.81 |
| WV-42383 | WV-42560 | 56.09 | 66.90 | 61.49 | 56.93 | 67.10 | 62.01 |
| WV-42385 | WV-42562 | 95.13 | 71.61 | 83.37 | 69.92 | 60.61 | 65.27 |
| WV-42390 | WV-42567 | 76.84 | 109.21 | 93.02 | 56.85 | 62.87 | 59.86 |
| WV-42391 | WV-42568 | 90.96 | 73.44 | 82.20 | 61.63 | 98.78 | 80.20 |
| WV-42392 | WV-42569 | 95.56 | 102.72 | 99.14 | 74.47 | 104.28 | 89.37 |
| WV-42393 | WV-42570 | 89.02 | 81.11 | 85.07 | 78.42 | 66.07 | 72.25 |
| WV-42395 | WV-42572 | 74.58 | 82.94 | 78.76 | 87.14 | 101.09 | 94.11 |
| WV-42396 | WV-42573 | 62.53 | 72.66 | 67.59 | 128.48 | 58.06 | 93.27 |
| WV-43135 | WV-43180 | 49.54 | 76.19 | 62.86 | 59.76 | 104.32 | 82.04 |
| WV-43136 | WV-43181 | 32.72 | 59.37 | 46.04 | 68.46 | 60.91 | 64.68 |
| WV-43137 | WV-43182 | 141.43 | 74.06 | 107.75 | 84.20 | 92.34 | 88.27 |
| WV-43138 | WV-43183 | 82.75 | 89.46 | 86.11 | 204.83 | 66.73 | 135.78 |
| WV-43143 | WV-43188 | 105.97 | 93.49 | 99.73 | 100.13 | 73.97 | 87.05 |
| WV-43145 | WV-43190 | 69.39 | 66.33 | 67.86 | 94.60 | 76.97 | 85.78 |
| WV-43146 | WV-43191 | 78.63 | 84.23 | 81.43 | 81.05 | 107.19 | 94.12 |
| WV-43147 | WV-43192 | 75.11 | 58.60 | 66.85 | 62.51 | 98.21 | 80.36 |
| WV-43151 | WV-43196 | 41.76 | 69.95 | 55.85 | 64.64 | 73.52 | 69.08 |
| WV-43152 | WV-43197 | 51.95 | 49.71 | 50.83 | 51.77 | 69.35 | 60.56 |
| WV-43153 | WV-43198 | 69.62 | 91.77 | 80.69 | 84.12 | 71.61 | 77.87 |
| WV-43154 | WV-43199 | 41.56 | 88.66 | 65.11 | 44.71 | 50.31 | 47.51 |
| WV-43155 | WV-43200 | 84.84 | 150.94 | 117.89 | 72.78 | 97.87 | 85.33 |
| WV-43157 | WV-43202 | 52.73 | 66.08 | 59.40 | 75.03 | 82.74 | 78.88 |
| WV-43158 | WV-43203 | 59.84 | 81.64 | 70.74 | 130.73 | 75.19 | 102.96 |
| WV-43164 | WV-43209 | 55.08 | 83.98 | 69.53 | 68.35 | 62.77 | 65.56 |
| WV-43166 | WV-43211 | 84.37 | 46.69 | 65.53 | 87.74 | 77.83 | 82.79 |
| WV-43167 | WV-43212 | 56.78 | 80.08 | 68.43 | 69.64 | 81.65 | 75.64 |
| WV-43170 | WV-43215 | 103.48 | 65.24 | 84.36 | 72.07 | 80.22 | 76.14 |
| WV-43171 | WV-43216 | 126.59 | 45.37 | 85.98 | 78.15 | 62.22 | 70.19 |
| WV-43173 | WV-43218 | 107.94 | 83.95 | 95.95 | 91.75 | 91.61 | 91.68 |
| WV-43174 | WV-43219 | 84.45 | 49.79 | 67.12 | 59.68 | 109.00 | 84.34 |

[1037] Table 12 shows % human HSD17B13 miRNA remaining (at 500, 50 and 5 nM by gymnotic delivery) relative to human SFRS9 control. N=2. N.D.: Not determined.

TABLE 12

| | | 500 nM | | | 50 nM | | | 5 nM | | |
|---|---|---|---|---|---|---|---|---|---|---|
| | | % remaining | % remaining | | % remaining | % remaining | | % remaining | % remaining | |
| | | mRNA | mRNA | | mRNA | mRNA | | mRNA | mRNA | |
| | | (hHSD17B13/ | (hHSD17B13/ | | (hHSD17B13/ | (hHSD17B13/ | | (hHSD17B13/ | (hHSD17B13/ | |
| Guide | Passenger | hSFRS9)-1 | hSFRS9)-2 | Mean | hSFRS9)-1 | hSFRS9)-2 | Mean | hSFRS9)-1 | hSFRS9)-2 | Mean |
| WV- | WV- | 10.95 | 11.14 | 11.04 | 26.95 | 32.48 | 29.71 | 53.74 | 67.81 | 60.77 |
| 43135 | 44173 | | | | | | | | | |
| WV- | WV- | 10.23 | 11.80 | 11.02 | 32.98 | 29.84 | 31.41 | 63.38 | 78.00 | 70.69 |
| 42373 | 42417 | | | | | | | | | |
| WV- | WV- | 8.17 | 21.36 | 14.77 | 24.53 | 25.89 | 25.21 | 51.21 | 64.43 | 57.82 |
| 45021 | 42588 | | | | | | | | | |
| WV- | WV- | 6.51 | 10.44 | 8.48 | 27.74 | 24.48 | 26.11 | 84.92 | 82.72 | 83.82 |
| 45022 | 42588 | | | | | | | | | |
| WV- | WV- | 8.73 | 14.72 | 11.72 | 34.35 | 36.20 | 35.27 | 63.42 | 69.86 | 66.64 |
| 45023 | 42588 | | | | | | | | | |
| WV- | WV- | 32.55 | 36.47 | 34.51 | 47.47 | 72.67 | 60.07 | 77.43 | 107.66 | 92.54 |
| 45024 | 42588 | | | | | | | | | |
| WV- | WV- | 13.08 | 20.28 | 16.68 | 41.04 | 41.90 | 41.47 | 57.27 | 77.45 | 67.36 |
| 45025 | 42588 | | | | | | | | | |
| WV- | WV- | 39.92 | 47.24 | 43.58 | 67.56 | 67.89 | 67.73 | 95.27 | 96.26 | 95.77 |
| 45026 | 42588 | | | | | | | | | |
| WV- | WV- | 8.97 | 11.60 | 10.28 | 30.71 | 38.06 | 34.38 | 76.32 | 74.23 | 75.27 |
| 45027 | 42588 | | | | | | | | | |
| WV- | WV- | 37.40 | 46.69 | 42.04 | 67.19 | 74.09 | 70.64 | 90.20 | 86.53 | 88.36 |
| 45028 | 42588 | | | | | | | | | |
| WV- | WV- | 11.89 | 27.35 | 19.62 | 27.77 | 36.28 | 32.02 | 76.85 | 79.32 | 78.08 |
| 45029 | 42588 | | | | | | | | | |
| WV- | WV- | 19.68 | 23.86 | 21.77 | 49.16 | 60.16 | 54.66 | 89.85 | 87.10 | 88.48 |
| 45030 | 42588 | | | | | | | | | |
| WV- | WV- | 3.42 | 5.24 | 4.33 | 12.75 | 17.51 | 15.13 | 47.45 | 52.25 | 49.85 |
| 45031 | 42588 | | | | | | | | | |
| WV- | WV- | 5.03 | 6.18 | 5.61 | 16.17 | 14.69 | 15.43 | 59.80 | 66.68 | 63.24 |
| 45032 | 42588 | | | | | | | | | |
| WV- | WV- | 3.73 | 13.22 | 8.47 | 30.22 | 23.84 | 27.03 | 62.68 | 61.76 | 62.22 |
| 45033 | 42588 | | | | | | | | | |
| WV- | WV- | 19.85 | 35.67 | 27.76 | 51.95 | 54.05 | 53.00 | 102.04 | 97.34 | 99.69 |
| 45034 | 42588 | | | | | | | | | |
| WV- | WV- | 8.65 | 8.64 | 8.65 | 24.26 | 31.61 | 27.94 | 77.18 | 63.47 | 70.33 |
| 45035 | 42588 | | | | | | | | | |
| WV- | WV- | 24.84 | 33.65 | 29.25 | 61.72 | 65.48 | 63.60 | 89.55 | 83.07 | 86.31 |
| 45036 | 42588 | | | | | | | | | |
| WV- | WV- | 7.99 | 6.39 | 7.19 | 26.11 | 20.39 | 23.25 | 62.74 | 94.80 | 78.77 |
| 45037 | 42588 | | | | | | | | | |
| WV- | WV- | 31.74 | 27.94 | 29.84 | 64.14 | 55.89 | 60.01 | 100.93 | 100.49 | 100.71 |
| 45038 | 42588 | | | | | | | | | |
| WV- | WV- | 10.74 | 12.57 | 11.66 | 26.79 | 30.34 | 28.57 | 64.10 | 60.78 | 62.44 |
| 45039 | 42588 | | | | | | | | | |
| WV- | WV- | 39.87 | 35.06 | 37.47 | 61.65 | 76.68 | 69.16 | 104.61 | 96.85 | 100.73 |
| 45040 | 42588 | | | | | | | | | |
| WV- | WV- | 3.48 | 3.67 | 3.58 | 21.67 | 23.26 | 22.46 | 59.50 | 64.74 | 62.12 |
| 42383 | 42427 | | | | | | | | | |
| WV- | WV- | 4.67 | 3.49 | 4.08 | 15.08 | 14.10 | 14.59 | 66.94 | 65.59 | 66.27 |
| 45041 | 42589 | | | | | | | | | |
| WV- | WV- | 2.26 | 6.06 | 4.16 | 12.98 | 14.99 | 13.98 | 57.41 | 53.71 | 55.56 |
| 45042 | 42589 | | | | | | | | | |
| WV- | WV- | 10.21 | 13.10 | 11.66 | 34.18 | 30.81 | 32.50 | 80.73 | 91.69 | 86.21 |
| 45043 | 42589 | | | | | | | | | |
| WV- | WV- | 24.59 | 22.95 | 23.77 | 56.42 | 56.29 | 56.35 | 81.01 | 80.82 | 80.91 |
| 45044 | 42589 | | | | | | | | | |
| WV- | WV- | 12.47 | 11.25 | 11.86 | 42.24 | 33.67 | 37.96 | 75.13 | 91.44 | 83.28 |
| 45045 | 42589 | | | | | | | | | |
| WV- | WV- | 21.44 | 26.01 | 23.72 | 70.63 | 66.31 | 68.47 | 78.58 | 94.66 | 86.62 |
| 45046 | 42589 | | | | | | | | | |
| WV- | WV- | 13.10 | 8.86 | 10.98 | 36.51 | 41.27 | 38.89 | 91.81 | 83.46 | 87.64 |
| 45047 | 42589 | | | | | | | | | |
| WV- | WV- | 30.58 | 30.99 | 30.78 | 58.82 | 63.92 | 61.37 | 81.12 | 86.25 | 83.68 |
| 45048 | 42589 | | | | | | | | | |
| WV- | WV- | 14.61 | 16.59 | 15.60 | 40.85 | 45.61 | 43.23 | 79.81 | 80.26 | 80.03 |
| 45049 | 42589 | | | | | | | | | |
| WV- | WV- | 34.06 | 24.36 | 29.21 | 54.47 | 60.20 | 57.33 | 90.11 | 89.59 | 89.85 |
| 45050 | 42589 | | | | | | | | | |
| WV- | WV- | 5.81 | 1.38 | 3.60 | 10.43 | 13.17 | 11.80 | 60.27 | 49.32 | 54.80 |
| 45051 | 42589 | | | | | | | | | |
| WV- | WV- | 4.16 | 3.71 | 3.93 | 5.30 | 10.16 | 7.73 | 38.13 | 41.91 | 40.02 |
| 45052 | 42589 | | | | | | | | | |
| WV- | WV- | 6.67 | 8.20 | 7.44 | 31.50 | 30.58 | 31.04 | 80.37 | 72.35 | 76.36 |
| 45053 | 42589 | | | | | | | | | |
| WV- | WV- | 22.92 | 15.45 | 19.18 | 48.21 | 43.42 | 45.81 | 89.91 | 85.25 | 87.58 |
| 45054 | 42589 | | | | | | | | | |
| WV- | WV- | 9.76 | 11.35 | 10.56 | 32.60 | 27.51 | 30.06 | 104.19 | 69.19 | 86.69 |
| 45055 | 42589 | | | | | | | | | |
| WV- | WV- | 32.08 | 15.17 | 23.63 | 54.42 | 53.20 | 53.81 | 82.41 | 82.02 | 82.22 |
| 45056 | 42589 | | | | | | | | | |
| WV- | WV- | 4.50 | 14.02 | 9.26 | 25.82 | 29.32 | 27.57 | 69.15 | 67.37 | 68.26 |
| 45057 | 42589 | | | | | | | | | |
| WV- | WV- | 21.41 | 19.99 | 20.70 | 48.40 | 43.09 | 45.74 | 91.20 | 110.39 | 100.79 |
| 45058 | 42589 | | | | | | | | | |
| WV- | WV- | 10.32 | 17.39 | 13.86 | 25.85 | 27.12 | 26.48 | 90.20 | 75.64 | 82.92 |
| 45059 | 42589 | | | | | | | | | |
| WV- | WV- | 40.77 | 26.84 | 33.81 | 45.71 | 50.73 | 48.22 | 89.90 | 78.25 | 84.08 |
| 45060 | 42589 | | | | | | | | | |

[1038] Table 13 shows % human HSD17B13 mRNA remaining (at 15, 3 and 0.6 nM by gymnotic delivery) relative to human SFRS9 control. N=2. N.D.: Not determined.

TABLE 13

| | | 15 nM | | | 3 nM | | | 0.6 nM | | |
|---|---|---|---|---|---|---|---|---|---|---|
| | | % remaining | % remaining | | % remaining | % remaining | | % remaining | % remaining | |
| | | mRNA | mRNA | | mRNA | mRNA | | mRNA | mRNA | |
| | | (hHSD17B13/ | (hHSD17B13/ | | (hHSD17B13/ | (hHSD17B13/ | | (hHSD17B13/ | (hHSD17B13/ | |
| Guide | Passenger | hSFRS9)-1 | hSFRS9)-2 | Mean | hSFRS9)-1 | hSFRS9)-2 | Mean | hSFRS9)-1 | hSFRS9)-2 | Mean |
| WV- | WV- | 14.92 | 20.01 | 17.47 | 30.78 | 27.40 | 29.09 | 39.02 | 48.66 | 43.84 |
| 43135 | 44173 | | | | | | | | | |
| WV- | WV- | 13.45 | 22.31 | 17.88 | 31.32 | 42.52 | 36.92 | 56.18 | 50.43 | 53.31 |
| 42373 | 42417 | | | | | | | | | |
| WV- | WV- | 17.46 | 15.97 | 16.72 | 43.36 | 21.65 | 32.51 | 44.01 | 49.00 | 46.50 |
| 45021 | 42588 | | | | | | | | | |
| WV- | WV- | 16.99 | 15.08 | 16.03 | 34.01 | 37.54 | 35.78 | 60.59 | 45.90 | 53.25 |
| 46471 | 42588 | | | | | | | | | |
| WV- | WV- | 11.93 | 18.97 | 15.45 | 40.43 | 40.72 | 40.57 | 38.82 | 39.42 | 39.12 |
| 46472 | 42588 | | | | | | | | | |
| WV- | WV- | 18.67 | 18.37 | 18.52 | 29.72 | 45.75 | 37.73 | 53.59 | 48.59 | 51.09 |
| 46473 | 42588 | | | | | | | | | |
| WV- | WV- | 12.27 | 13.40 | 12.83 | 54.38 | 27.21 | 40.80 | 45.11 | 45.84 | 45.47 |
| 46474 | 42588 | | | | | | | | | |
| WV- | WV- | 13.55 | 18.53 | 16.04 | 28.86 | 33.37 | 31.11 | 48.85 | 55.87 | 52.36 |
| 46475 | 42588 | | | | | | | | | |
| WV- | WV- | 13.65 | 20.13 | 16.89 | 28.42 | 25.05 | 26.74 | 42.87 | 42.84 | 42.86 |
| 46476 | 42588 | | | | | | | | | |
| WV- | WV- | 13.89 | 23.53 | 18.71 | 40.03 | 32.41 | 36.22 | 54.62 | 57.70 | 56.16 |
| 46477 | 42588 | | | | | | | | | |
| WV- | WV- | 14.90 | 12.48 | 13.69 | 29.40 | 34.10 | 31.75 | 56.10 | 50.67 | 53.38 |
| 45022 | 42588 | | | | | | | | | |
| WV- | WV- | 18.71 | 13.60 | 16.16 | 49.35 | 45.25 | 47.30 | 57.69 | 59.74 | 58.71 |
| 42580 | 42588 | | | | | | | | | |
| WV- | WV- | 29.54 | 33.99 | 31.76 | 49.63 | 54.13 | 51.88 | 57.45 | 62.09 | 59.77 |
| 46478 | 42588 | | | | | | | | | |
| WV- | WV- | 23.69 | 13.52 | 18.61 | 46.44 | 40.30 | 43.37 | 69.84 | 58.17 | 64.00 |
| 46479 | 42588 | | | | | | | | | |
| WV- | WV- | 17.08 | 14.45 | 15.76 | 23.66 | 29.85 | 26.75 | 53.17 | 41.74 | 47.45 |
| 46480 | 42588 | | | | | | | | | |
| WV- | WV- | 26.18 | 28.37 | 27.28 | 52.42 | 40.53 | 46.47 | 69.15 | 60.57 | 64.86 |
| 46481 | 42588 | | | | | | | | | |
| WV- | WV- | 18.86 | 11.49 | 15.17 | 33.78 | 19.88 | 26.83 | 45.31 | 48.14 | 46.72 |
| 46482 | 42588 | | | | | | | | | |
| WV- | WV- | 8.65 | 16.15 | 12.40 | 20.17 | 18.84 | 19.50 | 64.34 | 57.16 | 60.75 |
| 46483 | 42588 | | | | | | | | | |
| WV- | WV- | 11.95 | 12.40 | 12.17 | 17.82 | 23.09 | 20.45 | 40.08 | 46.87 | 43.48 |
| 42383 | 42427 | | | | | | | | | |
| WV- | WV- | 15.09 | 9.01 | 12.05 | 23.89 | 21.72 | 22.81 | 43.74 | 73.66 | 58.70 |
| 45041 | 42589 | | | | | | | | | |
| WV- | WV- | 14.15 | 9.83 | 11.99 | 22.45 | 27.84 | 25.14 | 49.33 | 52.71 | 51.02 |
| 46484 | 42589 | | | | | | | | | |
| WV- | WV- | 13.18 | 13.17 | 13.17 | 49.66 | 34.27 | 41.97 | 51.41 | 50.97 | 51.19 |
| 46485 | 42589 | | | | | | | | | |
| WV- | WV- | 13.49 | 13.61 | 13.55 | 26.24 | 23.84 | 25.04 | 46.44 | 46.51 | 46.48 |
| 46486 | 42589 | | | | | | | | | |
| WV- | WV- | 8.31 | 3.32 | 5.81 | 10.13 | 17.07 | 13.60 | 32.37 | 27.06 | 29.71 |
| 46487 | 42589 | | | | | | | | | |
| WV- | WV- | 13.95 | 19.82 | 16.88 | 36.04 | 23.74 | 29.89 | 61.12 | 69.45 | 65.29 |
| 46488 | 42589 | | | | | | | | | |
| WV- | WV- | 12.03 | 6.32 | 9.18 | 18.00 | 13.49 | 15.75 | 37.30 | 42.45 | 39.88 |
| 46489 | 42589 | | | | | | | | | |
| WV- | WV- | 5.85 | 10.36 | 8.11 | 18.68 | 17.12 | 17.90 | 32.64 | 30.58 | 31.61 |
| 46490 | 42589 | | | | | | | | | |
| WV- | WV- | 3.64 | 3.68 | 3.66 | 14.94 | 7.02 | 10.98 | 31.75 | 33.72 | 32.73 |
| 45042 | 42589 | | | | | | | | | |
| WV- | WV- | 11.09 | 6.44 | 8.77 | 30.91 | 21.33 | 26.12 | 42.47 | 43.94 | 43.20 |
| 42581 | 42589 | | | | | | | | | |
| WV- | WV- | 11.22 | 14.39 | 12.80 | 29.64 | 29.84 | 29.74 | 59.70 | 55.35 | 57.52 |
| 46491 | 42589 | | | | | | | | | |
| WV- | WV- | 8.15 | 8.71 | 8.43 | 24.23 | 21.16 | 22.70 | 43.38 | 37.88 | 40.63 |
| 46492 | 42589 | | | | | | | | | |
| WV- | WV- | 3.63 | 6.21 | 4.92 | 8.27 | 6.38 | 7.33 | 34.50 | 37.73 | 36.12 |
| 46493 | 42589 | | | | | | | | | |
| WV- | WV- | 22.41 | 11.21 | 16.81 | 34.02 | 25.92 | 29.97 | 73.94 | 76.25 | 75.09 |
| 46494 | 42589 | | | | | | | | | |
| WV- | WV- | N.D. | 6.93 | 6.93 | 17.34 | 8.36 | 12.85 | 36.07 | 46.42 | 41.24 |
| 46495 | 42589 | | | | | | | | | |
| WV- | WV- | 7.55 | 4.59 | 6.07 | 10.91 | 9.80 | 10.35 | 32.16 | 30.93 | 31.54 |
| 46496 | 42589 | | | | | | | | | |

[1039] Table 14 shows IC50 of knocking down human HSD17B13 mRNA in human primary hepatocyte.

TABLE 14

| Guide | Passenger | IC50 (pM) | 95% CI |
|---|---|---|---|
| WV-43135 | WV-44173 | 44.94 | 17.77 to 105.8 |
| WV-42383 | WV-42427 | 92.7 | 54.70 to 159.0 |
| WV-45041 | WV-42589 | 22.61 | 10.14 to 49.82 |
| WV-46490 | WV-42589 | 20.85 | 12.62 to 34.38 |
| WV-47138 | WV-42589 | 17.74 | 7.51 to 40.83 |
| WV-46487 | WV-42589 | 42.27 | 20.98 to 83.38 |
| WV-47158 | WV-42589 | 39.69 | 23.27 to 67.98 |
| WV-45042 | WV-42589 | 26.68 | 14.09 to 50.38 |
| WV-46496 | WV-42589 | 24.9 | 12.74 to 48.46 |
| WV-47139 | WV-42589 | 19.43 | 11.97 to 31.42 |
| WV-46493 | WV-42589 | 18.95 | 10.53 to 34.62 |
| WV-47159 | WV-42589 | 20.27 | 8.63 to 48.06 |

[1040] Table 15 shows IC50 of knocking down human HSD17B13 mRNA in human primary hepatocyte.

TABLE 15

| Guide | Passenger | IC50 (pM) | 95% CI |
|---|---|---|---|
| WV-47139 | WV-42589 | 156.5 | 35.13 to 555.5 |
| WV-47159 | WV-42589 | 177.7 | 96.48 to 329.6 |
| WV-49590 | WV-42589 | 123.6 | 72.21 to 209.2 |
| WV-49591 | WV-42589 | 277.9 | 130.2 to 604.9 |
| WV-49592 | WV-42427 | 730.5 | 378.8 to 1460 |
| WV-49593 | WV-42427 | 752.5 | 392.1 to 1534 |
| WV-42383 | WV-42427 | 394.3 | 198.8 to 802.2 |

### Example 3. Provided Oligonucleotides and Compositions are Active In Vivo

[1041] Among other things, the present disclosure demonstrated that provided oligonucleotides and compositions are active in vivo. In the present Example, animal procedures were performed under IACUC guidelines. To evaluate the potency, human HSD17B13 transgenic mice were dosed at 3 mg/kg on Day 1 by subcutaneous administration. Animals were euthanized on Day 8 by CO₂ asphyxiation followed by thoracotomy. After cardiac perfusion with PBS, liver samples were harvested and flash-frozen in dry ice. Processed serum samples were kept at −70° C. Liver total RNA was extracted using SV96 Total RNA Isolation kit (Promega), after tissue lysis with TRIzol and bromochloropropane. cDNA production from RNA samples were performed using High-Capacity cDNA Reverse Transcription kit (Thermo Fisher) following manufacturer's instructions and qPCR analysis performed in CFX System using iQ Multiplex Powermix (Bio-Rad). For human HSD17B13 mRNA, the following qPCR assay was utilized: Forward, 5′-CGAAGGGATCCTTACCTCATC-3′; Reverse, 5′-CCAAGGCCTGAAGTCTGAT-3′; Probe, 5′ATTTGCCGCTGTTGGCTTTCACAG-3′. Mouse HPRT was used as normalizer (Forward 5′-CAAACTTTGCTTTCCCTGGT-3′, Reverse 5′-TGGCCTGTATCCAACACTTC-3′, Probe 5′-ACCAGCAAGCTTGCAACCTTAACC-3′.

[1042] Table 16 shows % human HSD17B13 mRNA remaining relative to PBS control. N=5. N.D.: Not determined.

TABLE 16

| | |
|---|---|
| | % remaining of |
| animal | hHSD17B13 |
| No. | mRNA |

PBS

| | |
|---|---|
| 1 | 101.01 |
| 2 | 101.43 |
| 3 | 97.68 |
| 4 | 105.62 |
| 5 | 94.26 |
| Mean | 100.00 |

WV-42576/
WV-42584

| | |
|---|---|
| 6 | 62.69 |
| 7 | 44.74 |
| 8 | 71.94 |
| 9 | 52.97 |
| 10 | 84.76 |
| Mean | 63.42 |

WV-42577/
WV-42585

| | |
|---|---|
| 11 | 56.84 |
| 12 | 65.95 |
| 13 | 39.00 |
| 14 | 38.78 |
| 15 | N.D. |
| Mean | 50.14 |

WV-42578/
WV-42586

| | |
|---|---|
| 16 | N.D. |
| 17 | 56.67 |
| 18 | 92.65 |
| 19 | 48.41 |
| 20 | 68.44 |
| Mean | 66.54 |

WV-42579/
WV-42587

| | |
|---|---|
| 21 | 64.96 |
| 22 | 38.58 |
| 23 | 23.39 |
| 24 | N.D. |
| 25 | 47.42 |
| Mean | 43.59 |

WV-42580/
WV-42588

| | |
|---|---|
| 26 | 67.46 |
| 27 | 45.72 |
| 28 | 85.64 |
| 29 | 63.32 |
| 30 | 36.61 |
| Mean | 59.75 |

WV-42581/
WV-42589

| | |
|---|---|
| 31 | 18.25 |
| 32 | 34.95 |
| 33 | 48.25 |
| 34 | 58.59 |
| 35 | 61.91 |
| Mean | 44.39 |

WV-42582/
WV-42590

| | |
|---|---|
| 36 | 62.23 |
| 37 | 46.62 |
| 38 | 37.79 |
| 39 | 68.76 |
| 40 | 68.00 |
| Mean | 56.68 |

### Example 4. Provided Oligonucleotides and Compositions are Active In Vivo

[1043] Among other things, the present disclosure demonstrated that provided oligonucleotides and compositions are active in vivo. In the present Example, animal procedures were performed under IACUC guidelines. To evaluate the potency, human HSD17B13 transgenic mice were dosed at 5 mg/kg on Day 1 by subcutaneous administration. Animals were euthanized on Day 8 by CO₂ asphyxiation followed by thoracotomy. After cardiac perfusion with PBS, liver samples were harvested and flash-frozen in dry ice. Processed serum samples were kept at −70° C. Liver total RNA was extracted using SV96 Total RNA Isolation kit (Promega), after tissue lysis with TRIzol and bromochloropropane. cDNA production from RNA samples were performed using High-Capacity cDNA Reverse Transcription kit (Thermo Fisher) following manufacturer's instructions and qPCR analysis performed in CFX System using iQ Multiplex Powermix (Bio-Rad). For human HSD17B13 mRNA, the following qPCR assay was utilized: Forward, 5′-CGAAGGGATCCTTACCTCATC-3′; Reverse, 5′-CCAAGGCCTGAAGTCTGAT-3′; Probe, 5′ATTTGCCGCTGTTGGCTTTCACAG-3′. Mouse HPRT was used as normalizer (Forward 5′-CAAACTTTGCTTTCCCTGGTT-3′, Reverse 5′-TGGCCTGTATCCAACACTTC-3′, Probe 5′-ACCAGCAAGCTTGCAACCTTAACC-3′.

[1044] Table 17 shows % human HSD17B13 mRNA remaining relative to PBS control. N=7. N.D.: Not determined.

TABLE 17

| | |
|---|---|
| | % remaining of |
| animal | hHSD17B13 |
| No. | mRNA |

PBS

| | |
|---|---|
| 1 | 107.09 |
| 2 | 100.15 |
| 3 | 88.98 |
| 4 | 101.64 |
| 5 | 101.25 |
| 6 | 100.89 |
| 7 | N.D. |
| Mean | 100.00 |

WV-42373/
WV-42417

| | |
|---|---|
| 8 | 32.64 |
| 9 | 39.40 |
| 10 | 25.35 |
| 11 | 31.78 |
| 12 | 36.63 |
| 13 | 36.04 |
| 14 | 35.28 |
| Mean | 33.88 |

WV-42381/
WV-42425

| | |
|---|---|
| 15 | 39.70 |
| 16 | 38.68 |
| 17 | 36.11 |
| 18 | 34.22 |
| 19 | 46.27 |
| 20 | 34.14 |
| 21 | 48.90 |
| Mean | 39.71 |

WV-42383/
WV-42427

| | |
|---|---|
| 22 | 28.74 |
| 23 | 34.78 |
| 24 | 33.39 |
| 25 | 32.06 |
| 26 | 32.34 |
| 27 | 39.08 |
| 28 | 53.22 |
| Mean | 36.23 |

WV-42392/
WV-42436

| | |
|---|---|
| 29 | 140.71 |
| 30 | 98.76 |
| 31 | 108.37 |
| 32 | 138.59 |
| 33 | 102.37 |
| 34 | 100.42 |
| 35 | 100.58 |
| Mean | 112.83 |

WV-43135/
WV-44173

| | |
|---|---|
| 36 | 34.59 |
| 37 | 60.53 |
| 38 | 63.31 |
| 39 | 45.67 |
| 40 | 71.15 |
| 41 | 47.75 |
| 42 | 64.02 |
| Mean | 55.29 |

WV-43136/
WV-44174

| | |
|---|---|
| 43 | 9.05 |
| 44 | 41.89 |
| 45 | 30.35 |
| 46 | 39.11 |
| 47 | 39.96 |
| 48 | 37.13 |
| 49 | 42.39 |
| Mean | 34.27 |

### Example 5. Provided Oligonucleotides and Compositions are Active In Vivo

[1045] Among other things, the present disclosure demonstrated that provided oligonucleotides and compositions are active in vivo. In the present Example, animal procedures were performed under IACUC guidelines. To evaluate the potency, human HSD171B13 transgenic mice were dosed at desired oligonucleotide concentration on Day 1 by subcutaneous administration. Animals were euthanized on Day 8 by CO₂ asphyxiation followed by thoracotomy. After cardiac perfusion with PBS, liver samples were harvested and flash-frozen in dry ice. Processed serum samples were kept at −70° C. Liver total RNA was extracted using SV96 Total RNA Isolation kit (Promega), after tissue lysis with TRIzol and bromochloropropane. cDNA production from RNA samples were performed using High-Capacity cDNA Reverse Transcription kit (Thermo Fisher) following manufacturer's instructions and qPCR analysis performed in CFX System using iQ Multiplex Powermix (Bio-Rad). For human HSD17B13 mRNA, the following qPCR assay was utilized: Forward, 5′-CGAAGGGATCCTTACCTCATC-3′; Reverse, 5′-CCAAGGCCTGAAGTCTGAT-3′; Probe, 5′ATTTGCCGCTGTTGGCTTTCACAG-3′. Mouse HPRT was used as normalizer (Forward 5′-CAAACTTTGCTTTCCCTGGT-3′, Reverse 5′-TGGCCTGTATCCAACACTTC-3′, Probe 5′-ACCAGCAAGCTTGCAACCTTAACC-3′.

[1046] Table 18 shows % human HSD7B13 mRNA remaining relative to PBS control. N=5. N.D.: Not determined.

TABLE 18

| | |
|---|---|
| | % remaining of |
| animal | hHSD17B13 |
| No. | mRNA |

PBS

| | |
|---|---|
| 1 | 98.63 |
| 2 | 104.66 |
| 3 | 108.25 |
| 4 | 82.46 |
| 5 | 106.01 |
| Mean | 100.00 |

WV-43135/
WV-44173
3 mg/kg

| | |
|---|---|
| 6 | 42.68 |
| 7 | 40.07 |
| 8 | 44.55 |
| 9 | 29.68 |
| 10 | 49.09 |
| Mean | 41.21 |

WV-42373/
WV-42417
1 mg/kg

| | |
|---|---|
| 11 | 54.55 |
| 12 | 54.14 |
| 13 | 64.07 |
| 14 | 61.94 |
| 15 | 58.42 |
| Mean | 58.63 |

WV-42373/
WV-42417
3 mg/kg

| | |
|---|---|
| 16 | 37.77 |
| 17 | 36.90 |
| 18 | 30.32 |
| 19 | 46.35 |
| 20 | 49.20 |
| Mean | 40.11 |

WV-42373/
WV-42417
10 mg/kg

| | |
|---|---|
| 21 | 10.94 |
| 22 | 33.04 |
| 23 | 8.59 |
| 24 | 23.00 |
| 25 | 29.15 |
| Mean | 20.94 |

WV-42383/
WV-42427
1 mg/kg

| | |
|---|---|
| 26 | 76.03 |
| 27 | 85.94 |
| 28 | 70.69 |
| 29 | 71.36 |
| 30 | 93.10 |
| Mean | 79.42 |

WV-42383/
WV-42427
3 mg/kg

| | |
|---|---|
| 31 | 33.38 |
| 32 | 19.14 |
| 33 | 45.10 |
| 34 | 47.61 |
| 35 | 30.32 |
| Mean | 35.11 |

WV-42383/
WV-42427
10 mg/kg

| | |
|---|---|
| 36 | 24.94 |
| 37 | 15.73 |
| 38 | 12.63 |
| 39 | 17.41 |
| 40 | 18.75 |
| Mean | 17.89 |

### Example 6. Provided Oligonucleotides and Compositions are Active In Vivo

[1047] Among other things, the present disclosure demonstrated that provided oligonucleotides and compositions are active in vivo. In the present Example, animal procedures were performed under IACUC guidelines. To evaluate the potency and liver exposure of provided oligonucleotides and compositions, human HSD17B13 transgenic mice were dosed at 3 mg/kg on Day 1 by subcutaneous administration. Animals were euthanized on Day 8 by CO₂ asphyxiation followed by thoracotomy. After cardiac perfusion with PBS, liver samples were harvested and flash-frozen in dry ice. Processed serum samples were kept at −70° C. Liver total RNA was extracted using SV96 Total RNA Isolation kit (Promega), after tissue lysis with TRIzol and bromochloropropane. cDNA production from RNA samples were performed using High-Capacity cDNA Reverse Transcription kit (Thermo Fisher) following manufacturer's instructions and qPCR analysis performed in CFX System using iQ Multiplex Powermix (Bio-Rad). For human HSD17B13 mRNA, the following qPCR assay was utilized: Forward, 5′-CGAAGGGATCCTTACCTCATC-3′; Reverse, 5′-CCAAGGCCTGAAGTTCTGAT-3′; Probe, 5′ATTTGCCGCTGTGGCTTTCACAG-3′.

[1048] Mouse HPRT was used as normalizer (Forward 5′-CAAACTTTGCTTTCCCTGGTT-3′, Reverse 5′-TGGCCTGTATCCAACACTC-3′, Probe 5′-ACCAGCAAGCTTGCAACCTrAACC-3′. Oligonucleotide accumulation in liver was determined by hybrid ELISA.

[1049] Table 19 shows % human HSD17B13 mRNA remaining relative to PBS control. N=5. N.D.: Not determined.

TABLE 19

| | |
|---|---|
| | % remaining of |
| animal | hHSD17B13 |
| No. | mRNA |

PBS

| | |
|---|---|
| 1 | 97.65 |
| 2 | 114.78 |
| 3 | 96.99 |
| 4 | 97.05 |
| 5 | 93.53 |
| Mean | 100.00 |

WV-43135/
WV-44173

| | |
|---|---|
| 6 | 15.05 |
| 7 | 62.14 |
| 8 | 20.88 |
| 9 | 49.44 |
| 10 | 9.49 |
| Mean | 31.40 |

WV-42383/
WV-42427

| | |
|---|---|
| 11 | 26.80 |
| 12 | 40.23 |
| 13 | 40.75 |
| 14 | 53.79 |
| 15 | 38.76 |
| Mean | 40.07 |

WV-46490/
WV-42589

| | |
|---|---|
| 16 | 20.93 |
| 17 | 33.02 |
| 18 | 22.44 |
| 19 | 87.91 |
| 20 | 16.95 |
| Mean | 36.25 |

WV-47138/
WV-42589

| | |
|---|---|
| 21 | 33.11 |
| 22 | 25.87 |
| 23 | 22.73 |
| 24 | 17.60 |
| 25 | 20.26 |
| Mean | 23.91 |

WV-47158/
WV-42589

| | |
|---|---|
| 26 | 20.58 |
| 27 | 58.00 |
| 28 | 44.67 |
| 29 | 41.26 |
| 30 | 28.58 |
| Mean | 38.62 |

WV-46496/
WV-42589

| | |
|---|---|
| 31 | 15.24 |
| 32 | 16.12 |
| 33 | 12.72 |
| 34 | 13.37 |
| 35 | 22.60 |
| Mean | 16.01 |

WV-47139/
WV-42589

| | |
|---|---|
| 36 | 18.83 |
| 37 | 31.92 |
| 38 | 18.38 |
| 39 | 16.70 |
| 40 | 27.95 |
| Mean | 22.76 |

WV-47159/
WV-42589

| | |
|---|---|
| 41 | 24.78 |
| 42 | 20.26 |
| 43 | N.D. |
| 44 | 18.15 |
| 45 | 18.26 |
| Mean | 20.37 |

[1050] Table 20 shows % accumulation of antisense strand in liver tissue. N=5. N.D.: Not determined.

TABLE 20

| | |
|---|---|
| | antisense |
| animal | strand (μg/g |
| No. | of tissue) |

PBS

| | |
|---|---|
| 1 | 0.00 |
| 2 | 0.00 |
| 3 | 0.00 |
| 4 | 0.07 |
| 5 | 0.00 |
| Mean | 0.01 |

WV-42383/
WV-42427

| | |
|---|---|
| 11 | 6.41 |
| 12 | 7.18 |
| 13 | 5.91 |
| 14 | 8.01 |
| 15 | 4.96 |
| Mean | 6.49 |

WV-46490/
WV-42589

| | |
|---|---|
| 16 | 6.82 |
| 17 | 8.95 |
| 18 | 9.08 |
| 19 | N.D. |
| 20 | 6.87 |
| Mean | 7.93 |

WV-47138/
WV-42589

| | |
|---|---|
| 21 | 8.09 |
| 22 | 8.64 |
| 23 | 11.11 |
| 24 | 11.80 |
| 25 | 13.08 |
| Mean | 10.54 |

WV-47158/
WV-42589

| | |
|---|---|
| 26 | 8.51 |
| 27 | 8.43 |
| 28 | 10.14 |
| 29 | 11.00 |
| 30 | 6.21 |
| Mean | 8.86 |

WV-46496/
WV-42589

| | |
|---|---|
| 31 | 7.35 |
| 32 | 9.14 |
| 33 | 7.10 |
| 34 | 7.06 |
| 35 | 8.86 |
| Mean | 7.90 |

WV-47139/
WV-42589

| | |
|---|---|
| 36 | 10.27 |
| 37 | 9.81 |
| 38 | 8.91 |
| 39 | 9.83 |
| 40 | 6.87 |
| Mean | 9.14 |

WV-47159/
WV-42589

| | |
|---|---|
| 41 | 7.61 |
| 42 | 6.71 |
| 43 | 6.95 |
| 44 | 7.77 |
| 45 | 8.02 |
| Mean | 7.41 |

### Example 7. Provided Oligonucleotides and Compositions are Active In Vivo

[1051] Among other things, the present disclosure demonstrated that provided oligonucleotides and compositions are active in vivo. In the present Example, animal procedures were performed under IACUC guidelines. To evaluate the potency and liver exposure of provided oligonucleotides and compositions, human HSD17B13 transgenic mice were dosed at 3 mg/kg on Day 1 by subcutaneous administration. Animals were euthanized on Day 8, 22, and 48, by CO₂ asphyxiation followed by thoracotomy. After cardiac perfusion with PBS, liver samples were harvested and flash-frozen in dry ice. Processed serum samples were kept at −70° C. Liver total RNA was extracted using SV96 Total RNA Isolation kit (Promega), after tissue lysis with TRIzol and bromochloropropane. cDNA production from RNA samples were performed using High-Capacity cDNA Reverse Transcription kit (Thermo Fisher) following manufacturer's instructions and qPCR analysis performed in CFX System using iQ Multiplex Powermix (Bio-Rad). For human HSD17B13 mRNA, the following qPCR assay was utilized: Forward, 5′-CGAAGGGATCCTTACCTCATC-3′; Reverse, 5′-CCAAGGCCTGAAGTTCTGAT-3′; Probe, 5′ATTTGCCGCTGTTGGCTTTCACAG-3′. Mouse HPRT was used as normalizer (Forward 5′-CAAACTTTGCTTTCCCTGGTT-3′, Reverse 5′-TGGCCTGTATCCAACACTC-3′, Probe 5′-ACCAGCAAGCTTGCAACCTrAACC-3′. Oligonucleotide accumulation in liver was determined by hybrid ELISA.

[1052] Ago2 immunoprecipitation assay: Tissues (1 mpk dosed) were lysed in lysis buffer 50 mM Tris-HCl at pH 7.5, 200 mM NaCl, 0.5% Triton X-100, 2 mM EDTA, 1 mg/mL heparin) with protease inhibitor (Sigma-Aldrich). Lysate concentration was measured with a protein BCA kit (Pierce BCA protein assay kit or Bradford protein assay kit). Anti-Ago2 antibody was purchased from Wako Chemicals. Control mouse IgG was from eBioscience. Dynabeads (Invitrogen) were used to precipitate antibodies. Ago2-associated siRNA and endogenous miR122 were measured by Stem-Loop RT followed by TaqMan PCR analysis using Taqman mniRNA and siRNA assay kit (Thermo fisher) based on manufacturer's methods.

[1053] Table 21 shows % human HSD17B13 mRNA remaining relative to PBS control. N=4 or 5. N.D.: Not determined.

TABLE 21

| | |
|---|---|
| | % remaining of |
| animal | hHSD17B13 |
| No. | mRNA |

Day 8
PBS

| | |
|---|---|
| 1 | 106.61 |
| 2 | 118.82 |
| 3 | 74.58 |
| 4 | N.D. |
| Mean | 100.00 |

Day 8
WV-42383/
WV-42427

| | |
|---|---|
| 5 | 35.70 |
| 6 | 48.27 |
| 7 | 57.48 |
| 8 | 54.22 |
| 9 | 64.55 |
| Mean | 52.04 |

Day 8
WV-47139/
WV-42589

| | |
|---|---|
| 10 | 28.50 |
| 11 | 17.15 |
| 12 | 28.92 |
| 13 | 21.43 |
| 14 | 34.20 |
| Mean | 26.04 |

Day 22
PBS

| | |
|---|---|
| 15 | 110.98 |
| 16 | N.D. |
| 17 | 104.61 |
| 18 | 84.41 |
| Mean | 100.00 |

Day 22
WV-42383/
WV-42427

| | |
|---|---|
| 19 | 20.92 |
| 20 | 24.13 |
| 21 | 38.59 |
| 22 | 45.13 |
| 23 | 65.63 |
| Mean | 38.88 |

Day 22
WV-47139/
WV-42589

| | |
|---|---|
| 24 | 16.05 |
| 25 | 6.63 |
| 26 | 10.31 |
| 27 | 17.81 |
| 28 | 33.19 |
| Mean | 16.80 |

Day 48
PBS

| | |
|---|---|
| 29 | 124.59 |
| 30 | 108.81 |
| 31 | 90.53 |
| 32 | 76.07 |
| Mean | 100.00 |

Day 48
WV-42383/
WV-42427

| | |
|---|---|
| 33 | 46.63 |
| 34 | 60.18 |
| 35 | 47.92 |
| 36 | 56.26 |
| 37 | 101.66 |
| Mean | 62.53 |

Day 48
WV-47139/
WV-42589

| | |
|---|---|
| 38 | 38.44 |
| 39 | 29.55 |
| 40 | 29.89 |
| 41 | 24.51 |
| 42 | N.D. |
| Mean | 30.60 |

[1054] Table 22 shows % accumulation of antisense strand in liver tissue. N=4 or 5. N.D.: Not determined.

TABLE 22

| | |
|---|---|
| | antisense |
| animal | strand (μg/g |
| No. | of tissue) |

Day 8
PBS

| | |
|---|---|
| 1 | 0.00 |
| 2 | 0.00 |
| 3 | 0.00 |
| 4 | 0.00 |
| Mean | 0.00 |

Day 8
WV-42383/
WV-42427

| | |
|---|---|
| 5 | 5.97 |
| 6 | 6.53 |
| 7 | 6.63 |
| 8 | 4.81 |
| 9 | 6.01 |
| Mean | 5.99 |

Day 8
WV-47139/
WV-42589

| | |
|---|---|
| 10 | 8.69 |
| 11 | 9.92 |
| 12 | 9.83 |
| 13 | 9.23 |
| 14 | 9.07 |
| Mean | 9.35 |

Day 22
PBS

| | |
|---|---|
| 15 | 0.00 |
| 16 | 0.00 |
| 17 | 0.00 |
| 18 | 0.00 |
| Mean | 0.00 |

Day 22
WV-42383/
WV-42427

| | |
|---|---|
| 19 | 2.93 |
| 20 | 2.70 |
| 21 | 2.73 |
| 22 | 2.77 |
| 23 | 3.05 |
| Mean | 2.84 |

Day 22
WV-47139/
WV-42589

| | |
|---|---|
| 24 | 3.87 |
| 25 | 4.37 |
| 26 | 4.41 |
| 27 | 4.63 |
| 28 | 4.69 |
| Mean | 4.39 |

Day 48
PBS

| | |
|---|---|
| 29 | 0.00 |
| 30 | 0.00 |
| 31 | 0.00 |
| 32 | 0.00 |
| Mean | 0.00 |

Day 48
WV-42383/
WV-42427

| | |
|---|---|
| 33 | 1.20 |
| 34 | 1.02 |
| 35 | 0.67 |
| 36 | 0.73 |
| 37 | 0.61 |
| Mean | 0.85 |

Day 48
WV-47139/
WV-42589

| | |
|---|---|
| 38 | 1.89 |
| 39 | 1.68 |
| 40 | 1.83 |
| 41 | 1.72 |
| 42 | 1.82 |
| Mean | 1.79 |

[1055] Table 23 shows % Ago2 loading of antisense strand relative to miR-122. N=3.

TABLE 23

| | | | | | Relative |
|---|---|---|---|---|---|
| | Ct: | Ct: miR- | Ct: | Ct: miR- | HSD/miR- |
| | HSD/Ago2 | 122/Ago2 | HSD/IgG | 122/IgG | 122/WV-42383 |
| WV-42383 | 27.5 | 17.2 | 37.6 | 27.5 | 0.97 |
| day 8 # 5-1 | | | | | |
| WV-42383 | 28.3 | 17.1 | 37.2 | 26.8 | 0.56 |
| day 8 # 6-1 | | | | | |
| WV-42383 | 26.9 | 17.5 | 36.0 | 27.2 | 1.84 |
| day 8 # 7-1 | | | | | |
| WV-47139 | 25.3 | 17.8 | 34.0 | 28.1 | 7.18 |
| day 8 # 10-1 | | | | | |
| WV-47139 | 24.9 | 17.7 | 34.1 | 28.4 | 8.44 |
| day 8 # 11-1 | | | | | |
| WV-47139 | 25.9 | 18.0 | 34.7 | 28.2 | 5.37 |
| day 8 # 12-1 | | | | | |
| WV-42383 | 28.7 | 17.5 | 38.3 | 28.3 | 0.53 |
| day 22 # 19-1 | | | | | |
| WV-42383 | 29.3 | 17.7 | 38.8 | 28.4 | 0.43 |
| day 22 # 20-1 | | | | | |
| WV-42383 | 27.3 | 17.0 | 37.4 | 28.3 | 1.03 |
| day 22 # 21-1 | | | | | |
| WV-47139 | 25.4 | 17.7 | 34.3 | 27.7 | 6.27 |
| day 22 # 24-1 | | | | | |
| WV-47139 | 26.5 | 18.3 | 37.0 | 29.8 | 4.34 |
| day 22 # 25-1 | | | | | |
| WV-47139 | 29.7 | 19.9 | 38.2 | 29.8 | 1.43 |
| day 22 # 26-1 | | | | | |
| WV-42383 | 30.4 | 16.9 | 39.1 | 27.1 | 0.11 |
| day 48 # 33-1 | | | | | |
| WV-42383 | 31.2 | 17.1 | 40.0 | 27.2 | 0.07 |
| day 48 # 34-1 | | | | | |
| WV-42383 | 29.9 | 17.0 | 40.0 | 28.4 | 0.17 |
| day 48 # 35-1 | | | | | |
| WV-47139 | 28.6 | 17.2 | 39.7 | 28.6 | 0.49 |
| day 48 # 38-1 | | | | | |
| WV-47139 | 26.5 | 16.9 | 38.2 | 28.8 | 1.63 |
| day 48 # 39-1 | | | | | |
| WV-47139 | 28.9 | 17.6 | 40.0 | 28.6 | 0.48 |
| day 48 # 40-1 | | | | | |

### Example 8. Provided Oligonucleotides and Compositions are Active In Vivo

[1056] Among other things, the present disclosure demonstrated that provided oligonucleotides and compositions are active in vivo. In the present Example, animal procedures were performed under IACUC guidelines. To evaluate the potency and liver exposure of provided oligonucleotides and compositions, human HSD17B13 transgenic mice were dosed at 3 mg/kg on Day 1 by subcutaneous administration. Animals were euthanized on Day 15, 50, and 99, by CO₂ asphyxiation followed by thoracotomy. After cardiac perfusion with PBS, liver samples were harvested and flash-frozen in dry ice. Processed serum samples were kept at −70° C. Liver total RNA was extracted using SV96 Total RNA Isolation kit (Promega), after tissue lysis with TRIzol and bromochloropropane. cDNA production from RNA samples were performed using High-Capacity cDNA Reverse Transcription kit (Thermo Fisher) following manufacturer's instructions and qPCR analysis performed in CFX System using iQ Multiplex Powermix (Bio-Rad). For human HSD17B13 mRNA, the following qPCR assay was utilized: Forward, 5′-CGAAGGGATCCTTACCTCATC-3′; Reverse, 5′-CCAAGGCCTGAAGTTCTGAT-3′; Probe, 5′ATTTGCCGCTGTTGGCTTTCACAG-3′. Mouse HPRT was used as normalizer (Forward 5′-CAAACTTTGCTTTCCCTGGTT-3′, Reverse 5′-TGGCCTGTATCCAACACTC-3′, Probe 5′-ACCAGCAAGCTTGCAACCTrAACC-3′. Oligonucleotide accumulation in liver was determined by hybrid ELISA.

[1057] Ago2 immunoprecipitation assay: Tissues (1 mpk dosed) were lysed in lysis buffer 50 mM Tris-HCl at pH 7.5, 200 mM NaCl, 0.5% Triton X-100, 2 mM EDTA, 1 mg/mL heparin) with protease inhibitor (Sigma-Aldrich). Lysate concentration was measured with a protein BCA kit (Pierce BCA protein assay kit or Bradford protein assay kit). Anti-Ago2 antibody was purchased from Wako Chemicals. Control mouse IgG was from eBioscience. Dynabeads (Invitrogen) were used to precipitate antibodies. Ago2-associated siRNA and endogenous miR122 were measured by Stem-Loop RT followed by TaqMan PCR analysis using Taqman miRNA and siRNA assay kit (Thermo fisher) based on manufacturer's methods.

[1058] Table 24 shows % human HSD17B13 mRNA remaining relative to PBS control. N=4 or 5. N.D.: Not determined.

TABLE 24

| | |
|---|---|
| | % remaining of |
| animal | hHSD17B13 |
| No. | mRNA |

Day 15
PBS

| | |
|---|---|
| 1 | 93.16 |
| 2 | 106.84 |
| 3 | 108.47 |
| 4 | 91.53 |
| Mean | 100.00 |

Day 15
WV-49593/
WV-42427

| | |
|---|---|
| 5 | 86.34 |
| 6 | 49.78 |
| 7 | 46.33 |
| 8 | 39.66 |
| Mean | 55.53 |

Day 15
WV-49592/
WV-42427

| | |
|---|---|
| 9 | 47.68 |
| 10 | 83.29 |
| 11 | 34.36 |
| 12 | 50.27 |
| 13 | 33.25 |
| Mean | 49.77 |

Day 15
WV-49591/
WV-42589

| | |
|---|---|
| 14 | 20.41 |
| 15 | 32.98 |
| 16 | 15.58 |
| 17 | 15.39 |
| 18 | 18.81 |
| Mean | 20.64 |

Day 15
WV-49590/
WV-42589

| | |
|---|---|
| 19 | 17.78 |
| 20 | 26.90 |
| 21 | 21.57 |
| 22 | 26.86 |
| 23 | 34.37 |
| Mean | 25.50 |

Day 50
PBS

| | |
|---|---|
| 24 | 80.16 |
| 25 | 111.46 |
| 26 | 108.37 |
| 27 | N.D. |
| Mean | 100.00 |

Day 50
WV-49593/
WV-42427

| | |
|---|---|
| 28 | 41.18 |
| 29 | 40.40 |
| 30 | 38.11 |
| 31 | 29.13 |
| Mean | 37.21 |

Day 50
WV-49592/
WV-42427

| | |
|---|---|
| 32 | 38.41 |
| 33 | 68.24 |
| 34 | 70.70 |
| 35 | 47.64 |
| 36 | 52.67 |
| Mean | 55.53 |

Day 50
WV-49591/
WV-42589

| | |
|---|---|
| 37 | 44.44 |
| 38 | 26.00 |
| 39 | 32.62 |
| 40 | 29.50 |
| 41 | 44.12 |
| Mean | 35.34 |

Day 50
WV-49590/
WV-42589

| | |
|---|---|
| 42 | 16.62 |
| 43 | 18.79 |
| 44 | 23.48 |
| 45 | 20.72 |
| 46 | 18.62 |
| Mean | 19.65 |

Day 99
PBS

| | |
|---|---|
| 47 | 115.07 |
| 48 | 71.95 |
| 49 | 106.52 |
| 50 | 106.47 |
| Mean | 100.00 |

Day 99
WV-49593/
WV-42427

| | |
|---|---|
| 51 | 80.60 |
| 52 | 99.87 |
| 53 | 84.43 |
| 54 | 120.85 |
| Mean | 96.44 |

Day 99
WV-49592/
WV-42427

| | |
|---|---|
| 55 | 97.46 |
| 56 | 105.91 |
| 57 | 79.85 |
| 58 | 73.97 |
| 59 | 87.64 |
| Mean | 88.97 |

Day 99
WV-49591/
WV-42589

| | |
|---|---|
| 60 | 54.02 |
| 61 | 48.91 |
| 62 | 29.16 |
| 63 | 40.87 |
| 64 | 64.15 |
| Mean | 47.42 |

Day 99
WV-49590/
WV-42589

| | |
|---|---|
| 65 | 27.70 |
| 66 | 17.53 |
| 67 | 20.69 |
| 68 | 20.61 |
| 69 | 16.64 |
| Mean | 20.64 |

[1059] Table 25 shows % accumulation of antisense strand in liver tissue. N=4 or 5. N.D.: Not determined.

TABLE 25

| | |
|---|---|
| | antisense |
| animal | strand (μg/g |
| No. | of tissue) |

Day 15
PBS

| | |
|---|---|
| 1 | 0.00 |
| 2 | 0.00 |
| 3 | 0.00 |
| 4 | 0.00 |
| Mean | 0.00 |

Day 15
WV-49593/
WV-42427

| | |
|---|---|
| 5 | 2.35 |
| 6 | 2.54 |
| 7 | 2.68 |
| 8 | 2.96 |
| Mean | 2.63 |

Day 15
WV-49592/
WV-42427

| | |
|---|---|
| 9 | 2.56 |
| 10 | 2.65 |
| 11 | 2.56 |
| 12 | 2.55 |
| 13 | 2.19 |
| Mean | 2.50 |

Day 15
WV-49591/
WV-42589

| | |
|---|---|
| 14 | 3.08 |
| 15 | 3.19 |
| 16 | 2.91 |
| 17 | 2.59 |
| 18 | 3.13 |
| Mean | 2.98 |

Day 15
WV-49590/
WV-42589

| | |
|---|---|
| 19 | 3.28 |
| 20 | 3.23 |
| 21 | 3.07 |
| 22 | 2.97 |
| 23 | 1.60 |
| Mean | 2.83 |

Day 50
PBS

| | |
|---|---|
| 24 | 0.00 |
| 25 | 0.00 |
| 26 | 0.00 |
| 27 | 0.00 |
| Mean | 0.00 |

Day 50
WV-49593/
WV-42427

| | |
|---|---|
| 28 | 0.48 |
| 29 | 0.41 |
| 30 | 0.49 |
| 31 | 0.60 |
| Mean | 0.49 |

Day 50
WV-49592/
WV-42427

| | |
|---|---|
| 32 | 0.54 |
| 33 | 0.54 |
| 34 | 0.51 |
| 35 | 0.55 |
| 36 | 0.49 |
| Mean | 0.53 |

Day 50
WV-49591/
WV-42589

| | |
|---|---|
| 37 | 0.61 |
| 38 | 0.54 |
| 39 | 0.68 |
| 40 | 0.55 |
| 41 | 0.59 |
| Mean | 0.59 |

Day 50
WV-49590/
WV-42589

| | |
|---|---|
| 42 | 0.56 |
| 43 | 0.62 |
| 44 | 0.65 |
| 45 | 0.61 |
| 46 | 0.65 |
| Mean | 0.62 |

Day 99
PBS

| | |
|---|---|
| 47 | 0.00 |
| 48 | 0.00 |
| 49 | 0.00 |
| 50 | 0.00 |
| Mean | 0.00 |

Day 99
WV-49593/
WV-42427

| | |
|---|---|
| 51 | 0.01 |
| 52 | 0.05 |
| 53 | 0.03 |
| 54 | 0.03 |
| Mean | 0.03 |

Day 99
WV-49592/
WV-42427

| | |
|---|---|
| 55 | 0.06 |
| 56 | 0.09 |
| 57 | 0.05 |
| 58 | 0.07 |
| 59 | 0.07 |
| Mean | 0.07 |

Day 99
WV-49591/
WV-42589

| | |
|---|---|
| 60 | 0.11 |
| 61 | 0.10 |
| 62 | 0.08 |
| 63 | 0.09 |
| 64 | 0.06 |
| Mean | 0.09 |

Day 99
WV-49590/
WV-42589

| | |
|---|---|
| 65 | 0.06 |
| 66 | 0.06 |
| 67 | 0.08 |
| 68 | 0.10 |
| 69 | 0.10 |
| Mean | 0.08 |

[1060] Table 26 shows % Ago2 loading of antisense strand relative to miR-122. N=2.

TABLE 26

| | | | | | Relative HSD/miR- |
|---|---|---|---|---|---|
| | Ct: | Ct: miR- | Ct: | Ct: miR- | 122 normalized with |
| | HSD/Ago2 | 122/Ago2 | HSD/IgG | 122/IgG | WV-49593 Day 15 |
| WV-49593-1 | 27.04 | 21.41 | 33.52 | 28.37 | 1.00 |
| Day 15 | | | | | |
| WV-49593-2 | 27.46 | 21.81 | 36.72 | 28.76 | 0.99 |
| Day 15 | | | | | |
| WV-49592-1 | 27 | 19.85 | 37.89 | 29.46 | 0.35 |
| Day 15 | | | | | |
| WV-49592-2 | 26.88 | 19.66 | 37.83 | 29.16 | 0.33 |
| Day 15 | | | | | |
| WV-49591-1 | 22.43 | 19.65 | 33.25 | 29.2 | 7.26 |
| Day 15 | | | | | |
| WV-49591-2 | 22.42 | 19.65 | 32.76 | 28.81 | 7.31 |
| Day 15 | | | | | |
| WV-49590-1 | 22.37 | 19.92 | 32.42 | 29.12 | 9.12 |
| Day 15 | | | | | |
| WV-49590-2 | 22.29 | 19.97 | 32.83 | 29.22 | 9.98 |
| Day 15 | | | | | |
| WV-49593-1 | 24.3 | 18.24 | 36.91 | 28.17 | 0.75 |
| Day 50 | | | | | |
| WV-49593-2 | 27.37 | 18.13 | 38.12 | 28.53 | 0.08 |
| Day 50 | | | | | |
| WV-49592-1 | 26.39 | 17.54 | 37.62 | 28.07 | 0.11 |
| Day 50 | | | | | |
| WV-49592-2 | 26.2 | 17.85 | 37.84 | 28.11 | 0.15 |
| Day 50 | | | | | |
| WV-49591-1 | 22.28 | 17.62 | 33.71 | 27.86 | 1.97 |
| Day 50 | | | | | |
| WV-49591-2 | 23.55 | 18.32 | 37.09 | 28.91 | 1.33 |
| Day 50 | | | | | |
| WV-49590-1 | 23.88 | 18.88 | 37.05 | 29.31 | 1.56 |
| Day 50 | | | | | |
| WV-49590-2 | 25.1 | 18.87 | 38.1 | 30.17 | 0.66 |
| Day 50 | | | | | |
| WV-49593-1 | 36.53 | 18.8 | 40 | 28.94 | 0.00 |
| Day 99 | | | | | |
| WV-49593-2 | 33.47 | 18.71 | 39.9 | 29.21 | 0.00 |
| Day 99 | | | | | |
| WV-49592-1 | 35.05 | 18.87 | 39.82 | 29.47 | 0.00 |
| Day 99 | | | | | |
| WV-49592-2 | 32.4 | 18.53 | 39.74 | 29.46 | 0.00 |
| Day 99 | | | | | |
| WV-49591-1 | 28.9 | 18.69 | 39.21 | 29.03 | 0.04 |
| Day 99 | | | | | |
| WV-49591-2 | 30.46 | 18.67 | 38.61 | 29.19 | 0.01 |
| Day 99 | | | | | |
| WV-49590-1 | 28.5 | 19.25 | 39.36 | 29.36 | 0.08 |
| Day 99 | | | | | |
| WV-49590-2 | 29.49 | 19.47 | 39.19 | 29.18 | 0.05 |
| Day 99 | | | | | |

### Example 9. Provided Oligonucleotides and Compositions can Effectively Knockdown HSD17B13 In Vitro

[1061] Various Double stranded oligonucleotides targeting HSD17B13 and compositions were designed, constructed, characterized and assessed. As appreciated by those skilled in the art, various technologies can be utilized to assess properties and/or activities of provided oligonucleotides and compositions thereof. Some of such technologies are described in this Example. Those skilled in the art appreciate that many other technologies can be readily utilized in accordance with the present disclosure. As demonstrated herein, double stranded oligonucleotides targeting HSD17B13 and compositions, among other things, can be highly active, e.g., in reducing levels of their target nucleic acids and proteins encoded thereby. A number of siRNAs were tested in vitro in NHP primary hepatocytes at a range of concentrations. Example protocol for in vitro determination of siRNA activity: For determination of siRNAs activity, siRNAs at specific concentration were gymotically delivered to NHP primary hepatocytes plated at 96-well plates, with 40,000 cells/well. Following 48 hours treatment, total RNA was extracted using SV96 Total RNA Isolation kit (Promega). cDNA production from RNA samples were performed using High-Capacity cDNA Reverse Transcription kit (Thermo Fisher) following manufacturer's instructions and qPCR analysis performed in CFX System using iQ Multiplex Powermix (Bio-Rad). For NHP HSD17B13, the following qPCR assay was utilized: Thermo Fisher Mf02888851-ml. SFRS9 was used as normalizer (Forward, 5′-TGGAATATGCCCTGCGTAAA-3′; Reverse, 5′-TGGTGCTTCTCTCAGGATAAAC-3′, Probe, 5′-TGGATGACACCAAATTCCGCTCTCA-3′. mRNA knockdown levels were calculated as % mRNA remaining relative to mock treatment.

[1062] Table 27 shows IC50 of knocking down NHP HSD17B13 mRNA in NHP primary hepatocyte.

TABLE 27

| Guide | Passenger | IC50 (pM) | 95% CI |
|---|---|---|---|
| WV-47139 | WV-42589 | 445.7 | 268.4 to 742.6 |
| WV-47159 | WV-42589 | 675.5 | 374.7 to 1217.0 |
| WV-49590 | WV-42589 | 1035.0 | 591.9 to 1840.0 |
| WV-49592 | WV-42427 | 2038.0 | 1091.0 to 3967.0 |
| WV-49593 | WV-42427 | 1378.0 | 730.9 to 2689.0 |
| WV-42383 | WV-42427 | 404.8 | 253.6 to 646.9 |

### Example 10. Provided Oligonucleotides and Compositions can Effectively Knockdown HSD17B13 In Vitro

[1063] Various Double stranded oligonucleotides targeting HSD17B13 and compositions were designed, constructed, characterized and assessed. As appreciated by those skilled in the art, various technologies can be utilized to assess properties and/or activities of provided oligonucleotides and compositions thereof. Some of such technologies are described in this Example. Those skilled in the art appreciate that many other technologies can be readily utilized in accordance with the present disclosure. As demonstrated herein, double stranded oligonucleotides targeting HSD17B13 and compositions, among other things, can be highly active, e.g., in reducing levels of their target nucleic acids and proteins encoded thereby.

[1064] A number of siRNAs were tested in vitro in human primary hepatocytes at a range of concentrations. Example protocol for in vitro determination of siRNA activity: For determination of siRNAs activity, siRNAs at specific concentration were gymotically delivered to human primary hepatocytes plated at 96-well plates, with 10,000 cells/well. Following 48 hours treatment, total RNA was extracted using SV96 Total RNA Isolation kit (Promega). cDNA production from RNA samples were performed using High-Capacity cDNA Reverse Transcription kit (Thermo Fisher) following manufacturer's instructions and qPCR analysis performed in CFX System using iQ Multiplex Powermix (Bio-Rad). For human HSD17B13 mRNA, the following qPCR assay was utilized: Forward, 5′-CGAAGGGATTCCTTACCTCATC-3′; Reverse, 5′-CCAAGGCCTGAAGTCTGAT-3′; Probe, 5′ATTTGCCGCTGTGGCTTTCACAG-3′.SFRS9 was used as normalizer (Forward, 5′-TGGAATATGCCCTGCGTAAA-3′; Reverse, 5′-TGGTGCTCTCTCAGGATAAAC-3′, Probe, 5′-TGGATGACACCAAATTCCGCTCTCA-3′. mRNA knockdown levels were calculated as % mRNA remaining relative to mock treatment.

[1065] Table 28 shows IC50 of knocking down human HSD17B13 mRNA in human primary hepatocyte.

TABLE 28

| Guide | Passenger | IC50 (pM) | 95% CI |
|---|---|---|---|
| WV-42383 | WV-42427 | 828.6 | 586.2 to 1176 |
| WV-49593 | WV-42427 | 759.5 | 431.6 to 1341 |
| WV-49592 | WV-42427 | 1836.0 | 1086 to 3140 |
| WV-47159 | WV-42589 | 363.3 | 247.6 to 536.6 |
| WV-49590 | WV-42589 | 557.8 | 370.1 to 843.2 |
| WV-49591 | WV-42589 | 505.1 | 347.6 to 734.5 |

### Example 11. Provided Oligonucleotides and Compositions are Active In Vivo

[1066] Among other things, the present disclosure demonstrated that provided oligonucleotides and compositions are active in vivo. In the present Example, animal procedures were performed under IACUC guidelines. To evaluate the potency and liver exposure of provided oligonucleotides and compositions, human HSD17B13 transgenic mice were dosed at 3 or 1.5 mg/kg on Day 1 by subcutaneous administration. Animals were euthanized on Day 90, by CO₂ asphyxiation followed by thoracotomy. After cardiac perfusion with PBS, liver samples were harvested and flash-frozen in dry ice. Liver total RNA was extracted using SV96 Total RNA Isolation kit (Promega), after tissue lysis with TRIzol and bromochloropropane. cDNA production from RNA samples were performed using High-Capacity cDNA Reverse Transcription kit (Thermo Fisher) following manufacturer's instructions and qPCR analysis performed in CFX System using iQ Multiplex Powermix (Bio-Rad). For human HSD17B13 mRNA, the following % PCR assay was utilized: Forward, 5′-CGAAGGGATCCTTACCTCATC-3′; Reverse, 5′-CCAAGGCCTGAAGTCTGAT-3′; Probe, 5′ATGCCGCTGTGGCTTCACAG-3′. Mouse HPRT was used as normalizer (Forward 5′-CAAACTTTGCTTTCCCTGGT-3′, Reverse 5′-TGGCCTGTATCCAACACTTC-3′, Probe 5′-ACCAGCAAGCTGCAACCTAACC-3′. Oligonucleotide accumulation in liver was determined by hybrid ELISA.

[1067] Table 29 shows % human HSD17B13 mRNA remaining relative to PBS control. N=4 or 5. N.D.: Not determined.

TABLE 29

| | |
|---|---|
| | % remaining of |
| animal | hHSD17B13 |
| No. | mRNA |

Day 90
PBS

| | |
|---|---|
| 1 | 90.50 |
| 2 | 111.09 |
| 3 | 96.42 |
| 4 | 101.99 |
| Mean | 100.00 |

Day 90
WV-49614/
WV-49615 (3 mpk)
(Non-targeting
Control)

| | |
|---|---|
| 5 | 61.99 |
| 6 | 95.13 |
| 7 | 78.86 |
| 8 | 79.34 |
| Mean | 78.83 |

Day 90
WV-42383/
WV-42427 (3 mpk)

| | |
|---|---|
| 9 | 101.24 |
| 10 | 37.67 |
| 11 | 56.06 |
| 12 | 38.85 |
| Mean | 58.46 |

Day 90
WV-49592/
WV-42427 (3 mpk)

| | |
|---|---|
| 13 | 31.88 |
| 14 | 47.88 |
| 15 | 57.80 |
| 16 | 27.74 |
| Mean | 41.33 |

Day 90
WV-49590/
WV-42589 (3 mpk)

| | |
|---|---|
| 17 | 27.13 |
| 18 | 33.22 |
| 19 | 27.93 |
| 20 | 31.11 |
| 21 | 19.98 |
| Mean | 27.88 |

Day 90
WV-49590/
WV-42589 (1.5 mpk)

| | |
|---|---|
| 22 | 23.35 |
| 23 | 24.26 |
| 24 | 31.20 |
| 25 | 29.10 |
| Mean | 26.98 |

[1068] Table 30 shows % accumulation of antisense strand in liver tissue. N=4 or 5. N.D.: Not determined Table 30

TABLE 30

| | |
|---|---|
| | antisense |
| animal | strand (μg/g |
| No. | of tissue) |

Day 90
PBS

| | |
|---|---|
| 1 | 0.00 |
| 2 | 0.00 |
| 3 | 0.00 |
| 4 | 0.00 |
| Mean | 0.00 |

Day 90
WV-49614/
WV-49615 (3 mpk)
(Non-targeting
Control)

| | |
|---|---|
| 5 | 0.03 |
| 6 | 0.04 |
| 7 | 0.03 |
| 8 | 0.04 |
| Mean | 0.04 |

Day 90
WV-42383/
WV-42427 (3 mpk)

| | |
|---|---|
| 9 | 0.06 |
| 10 | 0.15 |
| 11 | 0.04 |
| 12 | 0.09 |
| Mean | 0.09 |

Day 90
WV-49592/
WV-42427 (3 mpk)

| | |
|---|---|
| 13 | 0.11 |
| 14 | 0.14 |
| 15 | 0.14 |
| 16 | 0.10 |
| Mean | 0.12 |

Day 90
WV-49590/
WV-42589 (3 mpk)

| | |
|---|---|
| 17 | 0.20 |
| 18 | 0.18 |
| 19 | 0.21 |
| 20 | 0.23 |
| 21 | 0.22 |
| Mean | 0.21 |

Day 90
WV-49590/
WV-42589 (1.5 mpk)

| | |
|---|---|
| 22 | 0.13 |
| 23 | 0.12 |
| 24 | 0.12 |
| 25 | 0.15 |
| Mean | 0.13 |

[1069] Table 31 shows % Ago2 loading of antisense strand relative to miR-122. N=4 or 5.

TABLE 31

| | | | | | Relative HSD/miR- |
|---|---|---|---|---|---|
| | Ct: | Ct: miR- | Ct: | Ct: miR- | 122 normalized |
| | HSD/Ago2 | 122/Ago2 | HSD/IgG | 122/IgG | with WV-42383 |
| WV-42383-1 | 36.61 | 18.86 | 39.33 | 29.5 | 0.162604307 |
| WV-42383-2 | 32.85 | 18.24 | 39.27 | 29.22 | 1.670140758 |
| WV-42383-3 | 33.5 | 17.59 | 39.33 | 29.44 | 0.674238366 |
| WV-42383-4 | 31.75 | 16.97 | 39.13 | 29.78 | 1.493016569 |
| WV-49592-1 | 29.91 | 16.34 | 39.29 | 29.44 | 3.46955462 |
| WV-495920-2 | 31.25 | 16.33 | 38.28 | 29.25 | 1.352694294 |
| WV-49592-3 | 31.4 | 15.69 | 39.02 | 28.26 | 0.784347528 |
| WV-49592-4 | 29.36 | 16.37 | 38.66 | 29.03 | 5.186016614 |
| WV-49590 | 27.04 | 16.44 | 37.73 | 28.64 | 27.20959948 |
| (3 mpk)-1 | | | | | |
| WV-49590 | 28.36 | 15.64 | 38.89 | 28.48 | 6.259039681 |
| (3 mpk)-2 | | | | | |
| WV-49590 | 26.42 | 15.78 | 37.78 | 28.8 | 26.47150658 |
| (3 mpk)-3 | | | | | |
| WV-49590 | 28.92 | 17.07 | 38.19 | 28.76 | 11.42861489 |
| (3 mpk)-4 | | | | | |
| WV-49590 | 25.85 | 15.9 | 35.64 | 28.97 | 42.67404086 |
| (3 mpk)-5 | | | | | |
| WV-49590 | 31.25 | 16.01 | 38.99 | 28.37 | 1.086850212 |
| (1.5 mpk)-1 | | | | | |
| WV-49590 | 28.55 | 15.64 | 37.93 | 28.93 | 5.482182967 |
| (1.5 mpk)-2 | | | | | |
| WV-49590 | 30.86 | 15.29 | 39.48 | 28.31 | 0.866484495 |
| (1.5 mpk)-3 | | | | | |
| WV-49590 | 29.91 | 16.33 | 39.16 | 29.1 | 3.445100299 |
| (1.5 mpk)-4 | | | | | |

[1070] While various embodiments have been described and illustrated herein, those of ordinary skill in the art will readily envision a variety of other means and/or structures for performing the functions and/or obtaining the results and/or one or more of the advantages described in the present disclosure, and each of such variations and/or modifications is deemed to be included. More generally, those skilled in the art will readily appreciate that all parameters, dimensions, materials, and configurations described herein are meant to be example and that the actual parameters, dimensions, materials, and/or configurations may depend upon the specific application or applications for which the teachings of the present disclosure is/are used. Those skilled in the art will recognize, or be able to ascertain using no more than routine experimentation, many equivalents to the embodiments of the present disclosure. It is, therefore, to be understood that the foregoing embodiments are presented by way of example only and that, within the scope of the appended claims and equivalents thereto, claimed technologies may be practiced otherwise than as specifically described and claimed. In addition, any combination of two or more features, systems, articles, materials, kits, and/or methods, if such features, systems, articles, materials, kits, and/or methods are not mutually inconsistent, is included within the scope of the present disclosure.

What is claimed is:

1. A double-stranded RNAi (dsRNAi) agent comprising a guide strand and a passenger strand wherein:
a) the guide strand is complementary or substantially complementary to an HSD17B13 target RNA sequence, and comprises:
i. backbone phosphorothioate chiral centers in Sp configuration between the 3′ terminal nucleotide and the penultimate (N-1) nucleotide and as between the penultimate (N-1) nucleotide and the immediately upstream (N-2) nucleotide,
ii. backbone phosphorothioate chiral centers in Rp, Sp, or alternating configurations between the 5′ terminal (+1) nucleotide and the immediately downstream (+2)nucleotide and between the +2 nucleotide and the immediately downstream (+3) nucleotide;
iii. one or more backbone phosphorothioate chiral centers in Rp or Sp configuration upstream of backbone phosphorothioate chiral centers in Sp configuration between the 3′ terminal nucleotide and the penultimate (N-1) nucleotide and as between the penultimate (N-1) nucleotide and the immediately upstream (N-2) nucleotide; and/or
iv. one or more backbone phosphorothioate chiral centers in Rp or Sp configuration between the 5′ terminal (+1) nucleotide and the immediately downstream (+2) nucleotide and between the (+2) nucleotide and the immediately downstream (+3) nucleotide, as well as between one or both of: (a) the (+3) nucleotide and the (+4) nucleotide; and (b) the (+5) nucleotide and the (+6) nucleotide;
b) the guide strand comprises one or more Rp, Sp, or stereorandom non-negatively charged internucleotidic linkage occurs between any two adjacent nucleotides between the second (+2) nucleotide relative to the 5′ terminal nucleotide of the guide strand and the penultimate 3′ (N-1) nucleotide of the guide strand, where N is the 3′ terminal nucleotide;
c) the guide strand comprises a 2′ modification, of the 3′ nucleotide of a nucleotide pair linked by an Rp, Sp, or stereorandom non-negatively charged internucleotidic linkage;
d) the passenger strand comprises one or both of:
i. 0-n Rp, Sp, or stereorandom non-negatively charged internucleotidic linkages, where n is about 1 to 49, and
ii. one or more backbone chiral centers in Rp or Sp configuration,
e) each strand of the dsRNAi agent independently has a length of about 15 to about 49 nucleotides;
f) the dsRNAi is capable of directing HSD17B13-specific RNA interference.

2. A chirally controlled oligonucleotide composition comprising double stranded oligonucleotides wherein the guide and passenger strands of the double stranded oligonucleotides are independently characterized by:
a) a common base sequence and length;
b) a common pattern of backbone linkages; and
c) a common pattern of backbone chiral centers;
which composition is chirally controlled in that it is enriched, relative to a substantially racemic preparation of guide strands having the same common base sequence and length, for oligonucleotides having a common pattern of chiral centers; and
a) wherein the guide strands are complementary or substantially complementary to an HSD17B13 target RNA sequence, and comprise:
i. backbone phosphorothioate chiral centers in Sp configuration between the 3′ terminal nucleotide and the penultimate (N-1) nucleotide and as between the penultimate (N-1) nucleotide and the immediately upstream (N-2) nucleotide,
ii. backbone phosphorothioate chiral centers in Rp, Sp, or alternating configurations between the 5′ terminal (+1) nucleotide and the immediately downstream (+2)nucleotide and between the +2 nucleotide and the immediately downstream (+3) nucleotide;
iii. one or more backbone phosphorothioate chiral centers in Rp or Sp configuration upstream of backbone phosphorothioate chiral centers in Sp configuration between the 3′ terminal nucleotide and the penultimate (N-1) nucleotide and as between the penultimate (N-1) nucleotide and the immediately upstream (N-2) nucleotide; and/or
iv. one or more backbone phosphorothioate chiral centers in Rp or Sp configuration between the 5′ terminal (+1) nucleotide and the immediately downstream (+2) nucleotide and between the (+2) nucleotide and the immediately downstream (+3) nucleotide, as well as between one or both of: (a) the (+3) nucleotide and the (+4) nucleotide; and (b) the (+5) nucleotide and the (+6) nucleotide; or
b) the guide strand comprises one or more Rp, Sp, or stereorandom non-negatively charged internucleotidic linkage occurs between any two adjacent nucleotides between the second (+2) nucleotide relative to the 5′ terminal nucleotide of the guide strand and the penultimate 3′ (N-1) nucleotide of the guide strand, where N is the 3′ terminal nucleotide;
c) the guide strand comprises a 2′ modification, of the 3′ nucleotide of a nucleotide pair linked by an Rp, Sp, or stereorandom non-negatively charged internucleotidic linkage;
d) the passenger strands comprise one or both of:
i. 0-n Rp, Sp, or stereorandom non-negatively charged internucleotidic linkages, where n is about 1 to 49, and
ii. one or more backbone chiral centers in Rp or Sp configuration,
e) the guide and passenger strands have a length of about 15 to about 49 nucleotides; and
f) the guide and passenger strands are capable of directing HSD17B13-specific RNA interference.

3. The double stranded oligonucleotide of claim 1, wherein the guide strand comprises a 5′ terminal modification selected from: [chemical structure] [chemical structure]
Base: A, C, G, T, U, abasic, and modified nucleobases;
R: H, OH, O-alkyl, F, MOE, LNA bridge to the 4′ position, BNA bridge to the 4′ position.

4. The double stranded oligonucleotide of claim 1, wherein the Rp, Sp, or stereorandom non-negatively charged backbone internucleotidic linkages have neutral charge.

5. The double stranded oligonucleotide or composition of claim 4, wherein the neutral backbone internucleotidic linkages is

[chemical structure]

6. The composition of claim 2, wherein the guide and passenger strands in the composition that independently share a common base sequence, a common pattern of base modification, a common pattern of sugar modification, and/or a common pattern of internucleotidic linkages are at least 90% of all the guide and passenger strands in the composition.

7. The double stranded oligonucleotide of claim 1, wherein at least 20%, 25%, 30%, 35%, 40%, 45%, 50%, 55%, 60%, 65%, 70%, 75%, 80%, 85%, 90% or 95% of the internucleotidic linkages of the double stranded oligonucleotide are independently chiral internucleotidic linkages.

8. The double stranded oligonucleotide of claim 1, wherein at least 3%, 5%, 10%, 15%, 20%, 25%, 30%, 35%, 40%, 45%, 50%, 55%, 60%, 65%, 70%, 75%, 80%, 85%, 90%, 95%, or 97% of the nucleotidic units of the double stranded oligonucleotide independently comprise a 2′-substitution.

9. The double stranded oligonucleotide of claim 1, wherein the guide strand comprises an HSD17B13 target-binding sequence that is completely complementary to an HSD17B13 target sequence, wherein the HSD17B13 target-binding sequence has a length of at least 10, 11, 12, 13, 14, 15, 16, 17, 18, 19 or 20 bases, wherein each base is optionally substituted adenine, cytosine, guanosine, thymine, or uracil, and wherein the HSD17B13 target sequence comprises one or more allelic sites, wherein an allelic site is a SNP or a mutation.

10. The double stranded oligonucleotide of claim 1, wherein the HSD17B13 target sequence comprises two SNPs.

11. The double stranded oligonucleotide of claim 1, wherein the HSD17B13 target sequence comprises an allelic site and the HSD17B13 target-binding sequence is completely complementary to the HSD17B13 target sequence of a disease-associated allele but not that of an allele less associated with the disease.

12. The double stranded oligonucleotide of claim 1, wherein
the double stranded oligonucleotide comprises a guide strand that binds with a transcript of an HSD17B13 target nucleic acid sequence for which a plurality of alleles exist within a population, each of which contains a specific nucleotide characteristic sequence element that defines the allele relative to other alleles of the same HSD17B13 target nucleic acid sequence,
wherein the base sequence of the guide strand is or comprises a sequence that is complementary to the characteristic sequence element that defines a target allele, and
the guide strand being characterized in that, when it is contacted with a cell comprising transcripts of HSD17B13 target nucleic acid sequence, it shows suppression of transcripts of the target allele, or a protein encoded thereby, at a level that is greater than a level of suppression observed for another allele of the same nucleic acid sequence.

13. The double stranded oligonucleotide of claim 1, comprising:
a guide strand comprising WV-47139 and a passenger strand comprising WV-42589;
a guide strand comprising WV-47159 and a passenger strand comprising WV-42589;
a guide strand comprising WV-49590 and a passenger strand comprising WV-42589;
or
a guide strand comprising WV-49591 and a passenger strand comprising WV-42589

14. A method for reducing level and/or activity of an HSD17B13 transcript or a protein encoded thereby, comprising administering to a cell expressing the HSD17B13 transcript a double stranded oligonucleotide, wherein the double stranded oligonucleotide comprises a guide strand and a passenger strand wherein:
a) the guide strand is complementary or substantially complementary to an HSD17B13 target RNA sequence, and comprises:
i. backbone phosphorothioate chiral centers in Sp configuration between the 3′ terminal nucleotide and the penultimate (N-1) nucleotide and as between the penultimate (N-1) nucleotide and the immediately upstream (N-2) nucleotide,
ii. backbone phosphorothioate chiral centers in Rp, Sp, or alternating configurations between the 5′ terminal (+1) nucleotide and the immediately downstream (+2)nucleotide and between the +2 nucleotide and the immediately downstream (+3) nucleotide;
iii. one or more backbone phosphorothioate chiral centers in Rp or Sp configuration upstream of backbone phosphorothioate chiral centers in Sp configuration between the 3′ terminal nucleotide and the penultimate (N-1) nucleotide and as between the penultimate (N-1) nucleotide and the immediately upstream (N-2) nucleotide; and/or
iv. one or more backbone phosphorothioate chiral centers in Rp or Sp configuration between the 5′ terminal (+1) nucleotide and the immediately downstream (+2) nucleotide and between the (+2) nucleotide and the immediately downstream (+3) nucleotide, as well as between one or both of: (a) the (+3) nucleotide and the (+4) nucleotide; and (b) the (+5) nucleotide and the (+6) nucleotide;
b) the guide strand comprises one or more Rp, Sp, or stereorandom non-negatively charged internucleotidic linkage occurs between any two adjacent nucleotides between the second (+2) nucleotide relative to the 5′ terminal nucleotide of the guide strand and the penultimate 3′ (N-1) nucleotide of the guide strand, where N is the 3′ terminal nucleotide;
c) the guide strand comprises a 2′ modification, of the 3′ nucleotide of a nucleotide pair linked by an Rp, Sp, or stereorandom non-negatively charged internucleotidic linkage;
d) the passenger strand comprises one or both of:
i. 0-n Rp, Sp, or stereorandom non-negatively charged internucleotidic linkages, where n is about 1 to 49, and
ii. one or more backbone chiral centers in Rp or Sp configuration,
e) each strand of the dsRNAi agent independently has a length of about 15 to about 49 nucleotides,
f) the dsRNAi is capable of directing HSD17B13-specific RNA interference;
wherein the guide strand of double stranded oligonucleotide comprises a HSD17B13-binding sequence that is completely complementary to an HSD17B13 target sequence in the transcript.

15. The method of claim 14, wherein the cell is an immune cell, a blood cell, a cardiac cell, a lung cell, an optic cell, a muscle cell, a liver cell, a kidney cell, a brain cell, a cell of the central nervous system, or a cell of the peripheral nervous system.

16. The method of claim 14, for allele specific suppression of an HSD17B13 transcript from a nucleic acid sequence for which a plurality of alleles exist within a population, each of which contains a specific nucleotide characteristic sequence element that defines the allele relative to other alleles of the same HSD17B13 target nucleic acid sequence, the method comprising steps of:
contacting a sample comprising transcripts of the HSD17B13 target nucleic acid sequence with a double stranded oligonucleotide or a composition of any one of the preceding claims,
wherein the guide strand of the double stranded oligonucleotide or composition comprises a HSD17B13-binding sequence that is identical or completely complementary to an HSD17B13 target sequence in the nucleic acid sequence, which HSD17B13 target sequence comprises a characteristic sequence element that defines a target allele, and
wherein when the guide strand of the double stranded oligonucleotide or composition is contacted with a cell comprising transcripts of both the target allele and another allele of the same nucleic acid sequence, transcripts of the target allele are suppressed at a greater level than a level of suppression observed for another allele of the same nucleic acid sequence.

17. The method of claim 14, for allele-specific suppression of an HSD17B13 transcript from a nucleic acid sequence for which a plurality of alleles exist within a population, each of which contains a specific nucleotide characteristic sequence element that defines the allele relative to other alleles of the same HSD17B13 target nucleic acid sequence, the method comprising steps of:
administering to a subject comprising transcripts of the HSD17B13 target nucleic acid sequence with a double stranded oligonucleotide or a composition of any one of the preceding claims,
wherein the guide strand of the double stranded oligonucleotide or composition comprises an HSD17B13-binding sequence that is identical or completely complementary to an HSD17B13 target sequence in the nucleic acid sequence, which HSD17B13 target sequence comprises a characteristic sequence element that defines a target allele, and
wherein when the guide strand of the double stranded oligonucleotide or composition is contacted with a cell comprising transcripts of both the HSD17B13 target allele and another allele of the same nucleic acid sequence, transcripts of the target allele are suppressed at a greater level than a level of suppression observed for another allele of the same nucleic acid sequence.

18. The method of claim 14, wherein when the oligonucleotide or oligonucleotide of the composition is contacted with a cell comprising transcripts of both the HSD17B13 target allele and another allele of the same nucleic acid sequence, it shows suppression of transcripts of the target allele at a level that is:
a) greater than when the composition is absent;
b) greater than a level of suppression observed for another allele of the same nucleic acid sequence; or
c) both greater than when the composition is absent, and greater than a level of suppression observed for another allele of the same nucleic acid sequence.

19. The method of claim 18 wherein the cell is an immune cell, a blood cell, a cardiac cell, a lung cell, an optic cell, a muscle cell, a liver cell, a kidney cell, a brain cell, a cell of the central nervous system, or a cell of the peripheral nervous system.

20. The method of claim 14, wherein suppression of HSD17B13 transcripts of the target allele is at a level that is both greater than when the composition is absent, and greater than a level of suppression observed for another allele of the same nucleic acid sequence.

The application's sequence listing, which the Patent Office published only in electronic form, follows.

SEQUENCE LISTING (1007 sequences)

SEQ ID NO: 1 - RNA, 21 nt, synthetic construct
  misc_feature 1..21: note = Synthetic: WV-38227
  misc_feature 1..21: note = Synthetic: SSR-0103649
  modified_base 1: mod_base = OTHER; note = 2-fluororibose uracil
  modified_base 1..2: mod_base = OTHER; note = phosphorothioate
  modified_base 2: mod_base = OTHER; note = 2-fluororibose cytosine
  modified_base 2..3: mod_base = OTHER; note = phosphorothioate
  modified_base 3: mod_base = um
  modified_base 4: mod_base = OTHER; note = 2-fluororibose guanine
  modified_base 5: mod_base = gm
  modified_base 6: mod_base = OTHER; note = 2-fluororibose uracil
  modified_base 7: mod_base = um
  modified_base 8: mod_base = OTHER; note = 2-fluororibose cytosine
  modified_base 9: mod_base = OTHER; note = 2-O-methylribose adenine
  modified_base 10: mod_base = OTHER; note = 2-fluororibose guanine
  modified_base 11: mod_base = um
  modified_base 12: mod_base = cm
  modified_base 13: mod_base = cm
  modified_base 14: mod_base = OTHER; note = 2-fluororibose uracil
  modified_base 15: mod_base = um
  modified_base 16: mod_base = OTHER; note = 2-fluororibose guanine
  modified_base 17: mod_base = um
  modified_base 18: mod_base = OTHER; note = 2-fluororibose guanine
  modified_base 19: mod_base = um
  modified_base 19..20: mod_base = OTHER; note = phosphorothioate
  modified_base 20: mod_base = um
  modified_base 20..21: mod_base = OTHER; note = phosphorothioate
  modified_base 21: mod_base = um
  source 1..21: mol_type = other RNA
tctggttcagtccttgtgttt

SEQ ID NO: 2 - RNA, 21 nt, synthetic construct
  misc_feature 1..21: note = Synthetic: WV-38228
  misc_feature 1..21: note = Synthetic: SSR-0103717
  modified_base 1: mod_base = OTHER; note = 2-fluororibose uracil
  modified_base 1..2: mod_base = OTHER; note = phosphorothioate
  modified_base 2: mod_base = OTHER; note = 2-fluororibose uracil
  modified_base 2..3: mod_base = OTHER; note = phosphorothioate
  modified_base 3: mod_base = cm
  modified_base 4: mod_base = OTHER; note = 2-fluororibose uracil
  modified_base 5: mod_base = gm
  modified_base 6: mod_base = OTHER; note = 2-fluororibose guanine
  modified_base 7: mod_base = um
  modified_base 8: mod_base = OTHER; note = 2-fluororibose uracil
  modified_base 9: mod_base = cm
  modified_base 10: mod_base = OTHER; note = 2-fluororibose adenine
  modified_base 11: mod_base = gm
  modified_base 12: mod_base = um
  modified_base 13: mod_base = cm
  modified_base 14: mod_base = OTHER; note = 2-fluororibose cytosine
  modified_base 15: mod_base = um
  modified_base 16: mod_base = OTHER; note = 2-fluororibose uracil
  modified_base 17: mod_base = gm
  modified_base 18: mod_base = OTHER; note = 2-fluororibose uracil
  modified_base 19: mod_base = gm
  modified_base 19..20: mod_base = OTHER; note = phosphorothioate
  modified_base 20: mod_base = um
  modified_base 20..21: mod_base = OTHER; note = phosphorothioate
  modified_base 21: mod_base = um
  source 1..21: mol_type = other RNA
ttctggttcagtccttgtgtt

SEQ ID NO: 3 - RNA, 21 nt, synthetic construct
  misc_feature 1..21: note = Synthetic: WV-38229
  misc_feature 1..21: note = Synthetic: SSR-0103742
  modified_base 1: mod_base = OTHER; note = 2-fluororibose uracil
  modified_base 1..2: mod_base = OTHER; note = phosphorothioate
  modified_base 2: mod_base = OTHER; note = 2-fluororibose uracil
  modified_base 2..3: mod_base = OTHER; note = phosphorothioate
  modified_base 3: mod_base = um
  modified_base 4: mod_base = OTHER; note = 2-fluororibose cytosine
  modified_base 5: mod_base = cm
  modified_base 6: mod_base = OTHER; note = 2-fluororibose uracil
  modified_base 7: mod_base = um
  modified_base 8: mod_base = OTHER; note = 2-fluororibose cytosine
  modified_base 9: mod_base = um
  modified_base 10: mod_base = OTHER; note = 2-fluororibose guanine
  modified_base 11: mod_base = gm
  modified_base 12: mod_base = um
  modified_base 13: mod_base = um
  modified_base 14: mod_base = OTHER; note = 2-fluororibose cytosine
  modified_base 15: mod_base = OTHER; note = 2-O-methylribose adenine
  modified_base 16: mod_base = OTHER; note = 2-fluororibose guanine
  modified_base 17: mod_base = um
  modified_base 18: mod_base = OTHER; note = 2-fluororibose cytosine
  modified_base 19: mod_base = cm
  modified_base 19..20: mod_base = OTHER; note = phosphorothioate
  modified_base 20: mod_base = um
  modified_base 20..21: mod_base = OTHER; note = phosphorothioate
  modified_base 21: mod_base = um
  source 1..21: mol_type = other RNA
tttccttctggttcagtcctt

SEQ ID NO: 4 - RNA, 21 nt, synthetic construct
  misc_feature 1..21: note = Synthetic: WV-38230
  misc_feature 1..21: note = Synthetic: SSR-0103655
  modified_base 1: mod_base = OTHER; note = 2-fluororibose uracil
  modified_base 1..2: mod_base = OTHER; note = phosphorothioate
  modified_base 2: mod_base = OTHER; note = 2-fluororibose cytosine
  modified_base 2..3: mod_base = OTHER; note = phosphorothioate
  modified_base 3: mod_base = um
  modified_base 4: mod_base = OTHER; note = 2-fluororibose uracil
  modified_base 5: mod_base = cm
  modified_base 6: mod_base = OTHER; note = 2-fluororibose cytosine
  modified_base 7: mod_base = um
  modified_base 8: mod_base = OTHER; note = 2-fluororibose uracil
  modified_base 9: mod_base = cm
  modified_base 10: mod_base = OTHER; note = 2-fluororibose uracil
  modified_base 11: mod_base = gm
  modified_base 12: mod_base = gm
  modified_base 13: mod_base = um
  modified_base 14: mod_base = OTHER; note = 2-fluororibose uracil
  modified_base 15: mod_base = cm
  modified_base 16: mod_base = OTHER; note = 2-fluororibose adenine
  modified_base 17: mod_base = gm
  modified_base 18: mod_base = OTHER; note = 2-fluororibose uracil
  modified_base 19: mod_base = cm
  modified_base 19..20: mod_base = OTHER; note = phosphorothioate
  modified_base 20: mod_base = um
  modified_base 20..21: mod_base = OTHER; note = phosphorothioate
  modified_base 21: mod_base = um
  source 1..21: mol_type = other RNA
tcttccttctggttcagtctt

SEQ ID NO: 5 - RNA, 21 nt, synthetic construct
  misc_feature 1..21: note = Synthetic: WV-38231
  misc_feature 1..21: note = Synthetic: SSR-0103650
  modified_base 1: mod_base = OTHER; note = 2-fluororibose uracil
  modified_base 1..2: mod_base = OTHER; note = phosphorothioate
  modified_base 2: mod_base = OTHER; note = 2-fluororibose cytosine
  modified_base 2..3: mod_base = OTHER; note = phosphorothioate
  modified_base 3: mod_base = um
  modified_base 4: mod_base = OTHER; note = 2-fluororibose guanine
  modified_base 5: mod_base = um
  modified_base 6: mod_base = OTHER; note = 2-fluororibose cytosine
  modified_base 7: mod_base = cm
  modified_base 8: mod_base = OTHER; note = 2-fluororibose uracil
  modified_base 9: mod_base = cm
  modified_base 10: mod_base = OTHER; note = 2-fluororibose uracil
  modified_base 11: mod_base = um
  modified_base 12: mod_base = cm
  modified_base 13: mod_base = cm
  modified_base 14: mod_base = OTHER; note = 2-fluororibose uracil
  modified_base 15: mod_base = um
  modified_base 16: mod_base = OTHER; note = 2-fluororibose cytosine
  modified_base 17: mod_base = um
  modified_base 18: mod_base = OTHER; note = 2-fluororibose guanine
  modified_base 19: mod_base = gm
  modified_base 19..20: mod_base = OTHER; note = phosphorothioate
  modified_base 20: mod_base = um
  modified_base 20..21: mod_base = OTHER; note = phosphorothioate
  modified_base 21: mod_base = um
  source 1..21: mol_type = other RNA
tctgtcctcttccttctggtt

SEQ ID NO: 6 - RNA, 21 nt, synthetic construct
  misc_feature 1..21: note = Synthetic: WV-38232
  misc_feature 1..21: note = Synthetic: SSR-0103674
  modified_base 1: mod_base = OTHER; note = 2-fluororibose uracil
  modified_base 1..2: mod_base = OTHER; note = phosphorothioate
  modified_base 2: mod_base = OTHER; note = 2-fluororibose guanine
  modified_base 2..3: mod_base = OTHER; note = phosphorothioate
  modified_base 3: mod_base = cm
  modified_base 4: mod_base = OTHER; note = 2-fluororibose uracil
  modified_base 5: mod_base = cm
  modified_base 6: mod_base = OTHER; note = 2-fluororibose uracil
  modified_base 7: mod_base = gm
  modified_base 8: mod_base = OTHER; note = 2-fluororibose uracil
  modified_base 9: mod_base = cm
  modified_base 10: mod_base = OTHER; note = 2-fluororibose cytosine
  modified_base 11: mod_base = um
  modified_base 12: mod_base = cm
  modified_base 13: mod_base = um
  modified_base 14: mod_base = OTHER; note = 2-fluororibose uracil
  modified_base 15: mod_base = cm
  modified_base 16: mod_base = OTHER; note = 2-fluororibose cytosine
  modified_base 17: mod_base = um
  modified_base 18: mod_base = OTHER; note = 2-fluororibose uracil
  modified_base 19: mod_base = cm
  modified_base 19..20: mod_base = OTHER; note = phosphorothioate
  modified_base 20: mod_base = um
  modified_base 20..21: mod_base = OTHER; note = phosphorothioate
  modified_base 21: mod_base = um
  source 1..21: mol_type = other RNA
tgctctgtcctcttccttctt

SEQ ID NO: 7 - RNA, 21 nt, synthetic construct
  misc_feature 1..21: note = Synthetic: WV-38233
  misc_feature 1..21: note = Synthetic: SSR-0103748
  modified_base 1: mod_base = OTHER; note = 2-fluororibose uracil
  modified_base 1..2: mod_base = OTHER; note = phosphorothioate
  modified_base 2: mod_base = OTHER; note = 2-fluororibose uracil
  modified_base 2..3: mod_base = OTHER; note = phosphorothioate
  modified_base 3: mod_base = um
  modified_base 4: mod_base = OTHER; note = 2-fluororibose guanine
  modified_base 5: mod_base = cm
  modified_base 6: mod_base = OTHER; note = 2-fluororibose uracil
  modified_base 7: mod_base = cm
  modified_base 8: mod_base = OTHER; note = 2-fluororibose uracil
  modified_base 9: mod_base = gm
  modified_base 10: mod_base = OTHER; note = 2-fluororibose uracil
  modified_base 11: mod_base = cm
  modified_base 12: mod_base = cm
  modified_base 13: mod_base = um
  modified_base 14: mod_base = OTHER; note = 2-fluororibose cytosine
  modified_base 15: mod_base = um
  modified_base 16: mod_base = OTHER; note = 2-fluororibose uracil
  modified_base 17: mod_base = cm
  modified_base 18: mod_base = OTHER; note = 2-fluororibose cytosine
  modified_base 19: mod_base = um
  modified_base 19..20: mod_base = OTHER; note = phosphorothioate
  modified_base 20: mod_base = um
  modified_base 20..21: mod_base = OTHER; note = phosphorothioate
  modified_base 21: mod_base = um
  source 1..21: mol_type = other RNA
tttgctctgtcctcttccttt

SEQ ID NO: 8 - RNA, 21 nt, synthetic construct
  misc_feature 1..21: note = Synthetic: WV-38234
  misc_feature 1..21: note = Synthetic: SSR-0103761
  modified_base 1: mod_base = OTHER; note = 2-fluororibose uracil
  modified_base 1..2: mod_base = OTHER; note = phosphorothioate
  modified_base 2: mod_base = OTHER; note = 2-fluororibose uracil
  modified_base 2..3: mod_base = OTHER; note = phosphorothioate
  modified_base 3: mod_base = um
  modified_base 4: mod_base = OTHER; note = 2-fluororibose uracil
  modified_base 5: mod_base = gm
  modified_base 6: mod_base = OTHER; note = 2-fluororibose cytosine
  modified_base 7: mod_base = um
  modified_base 8: mod_base = OTHER; note = 2-fluororibose cytosine
  modified_base 9: mod_base = um
  modified_base 10: mod_base = OTHER; note = 2-fluororibose guanine
  modified_base 11: mod_base = um
  modified_base 12: mod_base = cm
  modified_base 13: mod_base = cm
  modified_base 14: mod_base = OTHER; note = 2-fluororibose uracil
  modified_base 15: mod_base = cm
  modified_base 16: mod_base = OTHER; note = 2-fluororibose uracil
  modified_base 17: mod_base = um
  modified_base 18: mod_base = OTHER; note = 2-fluororibose cytosine
  modified_base 19: mod_base = cm
  modified_base 19..20: mod_base = OTHER; note = phosphorothioate
  modified_base 20: mod_base = um
  modified_base 20..21: mod_base = OTHER; note = phosphorothioate
  modified_base 21: mod_base = um
  source 1..21: mol_type = other RNA
ttttgctctgtcctcttcctt

SEQ ID NO: 9 - RNA, 21 nt, synthetic construct
  misc_feature 1..21: note = Synthetic: WV-38235
  misc_feature 1..21: note = Synthetic: SSR-0103679
  modified_base 1: mod_base = OTHER; note = 2-fluororibose uracil
  modified_base 1..2: mod_base = OTHER; note = phosphorothioate
  modified_base 2: mod_base = OTHER; note = 2-fluororibose guanine
  modified_base 2..3: mod_base = OTHER; note = phosphorothioate
  modified_base 3: mod_base = gm
  modified_base 4: mod_base = OTHER; note = 2-fluororibose cytosine
  modified_base 5: mod_base = um
  modified_base 6: mod_base = OTHER; note = 2-fluororibose uracil
  modified_base 7: mod_base = um
  modified_base 8: mod_base = OTHER; note = 2-fluororibose guanine
  modified_base 9: mod_base = cm
  modified_base 10: mod_base = OTHER; note = 2-fluororibose uracil
  modified_base 11: mod_base = cm
  modified_base 12: mod_base = um
  modified_base 13: mod_base = gm
  modified_base 14: mod_base = OTHER; note = 2-fluororibose uracil
  modified_base 15: mod_base = cm
  modified_base 16: mod_base = OTHER; note = 2-fluororibose cytosine
  modified_base 17: mod_base = um
  modified_base 18: mod_base = OTHER; note = 2-fluororibose cytosine
  modified_base 19: mod_base = um
  modified_base 19..20: mod_base = OTHER; note = phosphorothioate
  modified_base 20: mod_base = um
  modified_base 20..21: mod_base = OTHER; note = phosphorothioate
  modified_base 21: mod_base = um
  source 1..21: mol_type = other RNA
tggctttgctctgtcctcttt

SEQ ID NO: 10 - RNA, 21 nt, synthetic construct
  misc_feature 1..21: note = Synthetic: WV-38236
  misc_feature 1..21: note = Synthetic: SSR-0103731
  modified_base 1: mod_base = OTHER; note = 2-fluororibose uracil
  modified_base 1..2: mod_base = OTHER; note = phosphorothioate
  modified_base 2: mod_base = OTHER; note = 2-fluororibose uracil
  modified_base 2..3: mod_base = OTHER; note = phosphorothioate
  modified_base 3: mod_base = gm
  modified_base 4: mod_base = OTHER; note = 2-fluororibose guanine
  modified_base 5: mod_base = cm
  modified_base 6: mod_base = OTHER; note = 2-fluororibose uracil
  modified_base 7: mod_base = um
  modified_base 8: mod_base = OTHER; note = 2-fluororibose uracil
  modified_base 9: mod_base = gm
  modified_base 10: mod_base = OTHER; note = 2-fluororibose cytosine
  modified_base 11: mod_base = um
  modified_base 12: mod_base = cm
  modified_base 13: mod_base = um
  modified_base 14: mod_base = OTHER; note = 2-fluororibose guanine
  modified_base 15: mod_base = um
  modified_base 16: mod_base = OTHER; note = 2-fluororibose cytosine
  modified_base 17: mod_base = cm
  modified_base 18: mod_base = OTHER; note = 2-fluororibose uracil
  modified_base 19: mod_base = cm
  modified_base 19..20: mod_base = OTHER; note = phosphorothioate
  modified_base 20: mod_base = um
  modified_base 20..21: mod_base = OTHER; note = phosphorothioate
  modified_base 21: mod_base = um
  source 1..21: mol_type = other RNA
ttggctttgctctgtcctctt

SEQ ID NO: 11 - RNA, 21 nt, synthetic construct
  misc_feature 1..21: note = Synthetic: WV-38237
  misc_feature 1..21: note = Synthetic: SSR-0103636
  modified_base 1: mod_base = OTHER; note = 2-fluororibose uracil
  modified_base 1..2: mod_base = OTHER; note = phosphorothioate
  modified_base 2: mod_base = OTHER; note = 2-fluororibose cytosine
  modified_base 2..3: mod_base = OTHER; note = phosphorothioate
  modified_base 3: mod_base = OTHER; note = 2-O-methylribose adenine
  modified_base 4: mod_base = OTHER; note = 2-fluororibose uracil
  modified_base 5: mod_base = gm
  modified_base 6: mod_base = OTHER; note = 2-fluororibose guanine
  modified_base 7: mod_base = cm
  modified_base 8: mod_base = OTHER; note = 2-fluororibose uracil
  modified_base 9: mod_base = um
  modified_base 10: mod_base = OTHER; note = 2-fluororibose uracil
  modified_base 11: mod_base = gm
  modified_base 12: mod_base = cm
  modified_base 13: mod_base = um
  modified_base 14: mod_base = OTHER; note = 2-fluororibose cytosine
  modified_base 15: mod_base = um
  modified_base 16: mod_base = OTHER; note = 2-fluororibose guanine
  modified_base 17: mod_base = um
  modified_base 18: mod_base = OTHER; note = 2-fluororibose cytosine
  modified_base 19: mod_base = cm
  modified_base 19..20: mod_base = OTHER; note = phosphorothioate
  modified_base 20: mod_base = um
  modified_base 20..21: mod_base = OTHER; note = phosphorothioate
  modified_base 21: mod_base = um
  source 1..21: mol_type = other RNA
tcatggctttgctctgtcctt

SEQ ID NO: 12 - RNA, 21 nt, synthetic construct
  misc_feature 1..21: note = Synthetic: WV-38238
  misc_feature 1..21: note = Synthetic: SSR-0103709
  modified_base 1: mod_base = OTHER; note = 2-fluororibose uracil
  modified_base 1..2: mod_base = OTHER; note = phosphorothioate
  modified_base 2: mod_base = OTHER; note = 2-fluororibose uracil
  modified_base 2..3: mod_base = OTHER; note = phosphorothioate
  modified_base 3: mod_base = cm
  modified_base 4: mod_base = OTHER; note = 2-fluororibose adenine
  modified_base 5: mod_base = um
  modified_base 6: mod_base = OTHER; note = 2-fluororibose guanine
  modified_base 7: mod_base = gm
  modified_base 8: mod_base = OTHER; note = 2-fluororibose cytosine
  modified_base 9: mod_base = um
  modified_base 10: mod_base = OTHER; note = 2-fluororibose uracil
  modified_base 11: mod_base = um
  modified_base 12: mod_base = gm
  modified_base 13: mod_base = cm
  modified_base 14: mod_base = OTHER; note = 2-fluororibose uracil
  modified_base 15: mod_base = cm
  modified_base 16: mod_base = OTHER; note = 2-fluororibose uracil
  modified_base 17: mod_base = gm
  modified_base 18: mod_base = OTHER; note = 2-fluororibose uracil
  modified_base 19: mod_base = cm
  modified_base 19..20: mod_base = OTHER; note = phosphorothioate
  modified_base 20: mod_base = um
  modified_base 20..21: mod_base = OTHER; note = phosphorothioate
  modified_base 21: mod_base = um
  source 1..21: mol_type = other RNA
ttcatggctttgctctgtctt

SEQ ID NO: 13 - RNA, 21 nt, synthetic construct
  misc_feature 1..21: note = Synthetic: WV-38239
  misc_feature 1..21: note = Synthetic: SSR-0103737
  modified_base 1: mod_base = OTHER; note = 2-fluororibose uracil
  modified_base 1..2: mod_base = OTHER; note = phosphorothioate
  modified_base 2: mod_base = OTHER; note = 2-fluororibose uracil
  modified_base 2..3: mod_base = OTHER; note = phosphorothioate
  modified_base 3: mod_base = gm
  modified_base 4: mod_base = OTHER; note = 2-fluororibose uracil
  modified_base 5: mod_base = um
  modified_base 6: mod_base = OTHER; note = 2-fluororibose cytosine
  modified_base 7: mod_base = OTHER; note = 2-O-methylribose adenine
  modified_base 8: mod_base = OTHER; note = 2-fluororibose uracil
  modified_base 9: mod_base = gm
  modified_base 10: mod_base = OTHER; note = 2-fluororibose guanine
  modified_base 11: mod_base = cm
  modified_base 12: mod_base = um
  modified_base 13: mod_base = um
  modified_base 14: mod_base = OTHER; note = 2-fluororibose uracil
  modified_base 15: mod_base = gm
  modified_base 16: mod_base = OTHER; note = 2-fluororibose cytosine
  modified_base 17: mod_base = um
  modified_base 18: mod_base = OTHER; note = 2-fluororibose cytosine
  modified_base 19: mod_base = um
  modified_base 19..20: mod_base = OTHER; note = phosphorothioate
  modified_base 20: mod_base = um
  modified_base 20..21: mod_base = OTHER; note = phosphorothioate
  modified_base 21: mod_base = um
  source 1..21: mol_type = other RNA
ttgttcatggctttgctcttt

SEQ ID NO: 14 - RNA, 21 nt, synthetic construct
  misc_feature 1..21: note = Synthetic: WV-38240
  misc_feature 1..21: note = Synthetic: SSR-0103673
  modified_base 1: mod_base = OTHER; note = 2-fluororibose uracil
  modified_base 1..2: mod_base = OTHER; note = phosphorothioate
  modified_base 2: mod_base = OTHER; note = 2-fluororibose guanine
  modified_base 2..3: mod_base = OTHER; note = phosphorothioate
  modified_base 3: mod_base = OTHER; note = 2-O-methylribose adenine
  modified_base 4: mod_base = OTHER; note = 2-fluororibose uracil
  modified_base 5: mod_base = gm
  modified_base 6: mod_base = OTHER; note = 2-fluororibose uracil
  modified_base 7: mod_base = um
  modified_base 8: mod_base = OTHER; note = 2-fluororibose cytosine
  modified_base 9: mod_base = OTHER; note = 2-O-methylribose adenine
  modified_base 10: mod_base = OTHER; note = 2-fluororibose uracil
  modified_base 11: mod_base = gm
  modified_base 12: mod_base = gm
  modified_base 13: mod_base = cm
  modified_base 14: mod_base = OTHER; note = 2-fluororibose uracil
  modified_base 15: mod_base = um
  modified_base 16: mod_base = OTHER; note = 2-fluororibose uracil
  modified_base 17: mod_base = gm
  modified_base 18: mod_base = OTHER; note = 2-fluororibose cytosine
  modified_base 19: mod_base = um
  modified_base 19..20: mod_base = OTHER; note = phosphorothioate
  modified_base 20: mod_base = um
  modified_base 20..21: mod_base = OTHER; note = phosphorothioate
  modified_base 21: mod_base = um
  source 1..21: mol_type = other RNA
tgatgttcatggctttgcttt

SEQ ID NO: 15 - RNA, 21 nt, synthetic construct
  misc_feature 1..21: note = Synthetic: WV-38241
  misc_feature 1..21: note = Synthetic: SSR-0103726
  modified_base 1: mod_base = OTHER; note = 2-fluororibose uracil
  modified_base 1..2: mod_base = OTHER; note = phosphorothioate
  modified_base 2: mod_base = OTHER; note = 2-fluororibose uracil
  modified_base 2..3: mod_base = OTHER; note = phosphorothioate
  modified_base 3: mod_base = gm
  modified_base 4: mod_base = OTHER; note = 2-fluororibose adenine
  modified_base 5: mod_base = um
  modified_base 6: mod_base = OTHER; note = 2-fluororibose guanine
  modified_base 7: mod_base = um
  modified_base 8: mod_base = OTHER; note = 2-fluororibose uracil
  modified_base 9: mod_base = cm
  modified_base 10: mod_base = OTHER; note = 2-fluororibose adenine
  modified_base 11: mod_base = um
  modified_base 12: mod_base = gm
  modified_base 13: mod_base = gm
  modified_base 14: mod_base = OTHER; note = 2-fluororibose cytosine
  modified_base 15: mod_base = um
  modified_base 16: mod_base = OTHER; note = 2-fluororibose uracil
  modified_base 17: mod_base = um
  modified_base 18: mod_base = OTHER; note = 2-fluororibose guanine
  modified_base 19: mod_base = cm
  modified_base 19..20: mod_base = OTHER; note = phosphorothioate
  modified_base 20: mod_base = um
  modified_base 20..21: mod_base = OTHER; note = phosphorothioate
  modified_base 21: mod_base = um
  source 1..21: mol_type = other RNA
ttgatgttcatggctttgctt

SEQ ID NO: 16 - RNA, 21 nt, synthetic construct
  misc_feature 1..21: note = Synthetic: WV-38242
  misc_feature 1..21: note = Synthetic: SSR-0103604
  modified_base 1: mod_base = OTHER; note = 2-fluororibose uracil
  modified_base 1..2: mod_base = OTHER; note = phosphorothioate
  modified_base 2: mod_base = OTHER; note = 2-fluororibose adenine
  modified_base 2..3: mod_base = OTHER; note = phosphorothioate
  modified_base 3: mod_base = gm
  modified_base 4: mod_base = OTHER; note = 2-fluororibose guanine
  modified_base 5: mod_base = OTHER; note = 2-O-methylribose adenine
  modified_base 6: mod_base = OTHER; note = 2-fluororibose uracil
  modified_base 7: mod_base = gm
  modified_base 8: mod_base = OTHER; note = 2-fluororibose adenine
  modified_base 9: mod_base = um
  modified_base 10: mod_base = OTHER; note = 2-fluororibose guanine
  modified_base 11: mod_base = um
  modified_base 12: mod_base = um
  modified_base 13: mod_base = cm
  modified_base 14: mod_base = OTHER; note = 2-fluororibose adenine
  modified_base 15: mod_base = um
  modified_base 16: mod_base = OTHER; note = 2-fluororibose guanine
  modified_base 17: mod_base = gm
  modified_base 18: mod_base = OTHER; note = 2-fluororibose cytosine
  modified_base 19: mod_base = um
  modified_base 19..20: mod_base = OTHER; note = phosphorothioate
  modified_base 20: mod_base = um
  modified_base 20..21: mod_base = OTHER; note = phosphorothioate
  modified_base 21: mod_base = um
  source 1..21: mol_type = other RNA
taggatgatgttcatggcttt

SEQ ID NO: 17 - RNA, 21 nt, synthetic construct
  misc_feature 1..21: note = Synthetic: WV-38243
  misc_feature 1..21: note = Synthetic: SSR-0103646
  modified_base 1: mod_base = OTHER; note = 2-fluororibose uracil
  modified_base 1..2: mod_base = OTHER; note = phosphorothioate
  modified_base 2: mod_base = OTHER; note = 2-fluororibose cytosine
  modified_base 2..3: mod_base = OTHER; note = phosphorothioate
  modified_base 3: mod_base = um
  modified_base 4: mod_base = OTHER; note = 2-fluororibose adenine
  modified_base 5: mod_base = gm
  modified_base 6: mod_base = OTHER; note = 2-fluororibose guanine
  modified_base 7: mod_base = OTHER; note = 2-O-methylribose adenine
  modified_base 8: mod_base = OTHER; note = 2-fluororibose uracil
  modified_base 9: mod_base = gm
  modified_base 10: mod_base = OTHER; note = 2-fluororibose adenine
  modified_base 11: mod_base = um
  modified_base 12: mod_base = gm
  modified_base 13: mod_base = um
  modified_base 14: mod_base = OTHER; note = 2-fluororibose uracil
  modified_base 15: mod_base = cm
  modified_base 16: mod_base = OTHER; note = 2-fluororibose adenine
  modified_base 17: mod_base = um
  modified_base 18: mod_base = OTHER; note = 2-fluororibose guanine
  modified_base 19: mod_base = gm
  modified_base 19..20: mod_base = OTHER; note = phosphorothioate
  modified_base 20: mod_base = um
  modified_base 20..21: mod_base = OTHER; note = phosphorothioate
  modified_base 21: mod_base = um
  source 1..21: mol_type = other RNA
tctaggatgatgttcatggtt

SEQ ID NO: 18 - RNA, 21 nt, synthetic construct
  misc_feature 1..21: note = Synthetic: WV-38244
  misc_feature 1..21: note = Synthetic: SSR-0103713
  modified_base 1: mod_base = OTHER; note = 2-fluororibose uracil
  modified_base 1..2: mod_base = OTHER; note = phosphorothioate
  modified_base 2: mod_base = OTHER; note = 2-fluororibose uracil
  modified_base 2..3: mod_base = OTHER; note = phosphorothioate
  modified_base 3: mod_base = cm
  modified_base 4: mod_base = OTHER; note = 2-fluororibose uracil
  modified_base 5: mod_base = OTHER; note = 2-O-methylribose adenine
  modified_base 6: mod_base = OTHER; note = 2-fluororibose guanine
  modified_base 7: mod_base = gm
  modified_base 8: mod_base = OTHER; note = 2-fluororibose adenine
  modified_base 9: mod_base = um
  modified_base 10: mod_base = OTHER; note = 2-fluororibose guanine
  modified_base 11: mod_base = OTHER; note = 2-O-methylribose adenine
  modified_base 12: mod_base = um
  modified_base 13: mod_base = gm
  modified_base 14: mod_base = OTHER; note = 2-fluororibose uracil
  modified_base 15: mod_base = um
  modified_base 16: mod_base = OTHER; note = 2-fluororibose cytosine
  modified_base 17: mod_base = OTHER; note = 2-O-methylribose adenine
  modified_base 18: mod_base = OTHER; note = 2-fluororibose uracil
  modified_base 19: mod_base = gm
  modified_base 19..20: mod_base = OTHER; note = phosphorothioate
  modified_base 20: mod_base = um
  modified_base 20..21: mod_base = OTHER; note = phosphorothioate
  modified_base 21: mod_base = um
  source 1..21: mol_type = other RNA
ttctaggatgatgttcatgtt

SEQ ID NO: 19 - RNA, 21 nt, synthetic construct
  misc_feature 1..21: note = Synthetic: WV-38245
  misc_feature 1..21: note = Synthetic: SSR-0103743
  modified_base 1: mod_base = OTHER; note = 2-fluororibose uracil
  modified_base 1..2: mod_base = OTHER; note = phosphorothioate
  modified_base 2: mod_base = OTHER; note = 2-fluororibose uracil
  modified_base 2..3: mod_base = OTHER; note = phosphorothioate
  modified_base 3: mod_base = um
  modified_base 4: mod_base = OTHER; note = 2-fluororibose cytosine
  modified_base 5: mod_base = um
  modified_base 6: mod_base = OTHER; note = 2-fluororibose adenine
  modified_base 7: mod_base = gm
  modified_base 8: mod_base = OTHER; note = 2-fluororibose guanine
  modified_base 9: mod_base = OTHER; note = 2-O-methylribose adenine
  modified_base 10: mod_base = OTHER; note = 2-fluororibose uracil
  modified_base 11: mod_base = gm
  modified_base 12: mod_base = OTHER; note = 2-O-methylribose adenine
  modified_base 13: mod_base = um
  modified_base 14: mod_base = OTHER; note = 2-fluororibose guanine
  modified_base 15: mod_base = um
  modified_base 16: mod_base = OTHER; note = 2-fluororibose uracil
  modified_base 17: mod_base = cm
  modified_base 18: mod_base = OTHER; note = 2-fluororibose adenine
  modified_base 19: mod_base = um
  modified_base 19..20: mod_base = OTHER; note = phosphorothioate
  modified_base 20: mod_base = um
  modified_base 20..21: mod_base = OTHER; note = phosphorothioate
  modified_base 21: mod_base = um
  source 1..21: mol_type = other RNA
tttctaggatgatgttcattt

SEQ ID NO: 20 - RNA, 21 nt, synthetic construct
  misc_feature 1..21: note = Synthetic: WV-38246
  misc_feature 1..21: note = Synthetic: SSR-0103757
  modified_base 1: mod_base = OTHER; note = 2-fluororibose uracil
  modified_base 1..2: mod_base = OTHER; note = phosphorothioate
  modified_base 2: mod_base = OTHER; note = 2-fluororibose uracil
  modified_base 2..3: mod_base = OTHER; note = phosphorothioate
  modified_base 3: mod_base = um
  modified_base 4: mod_base = OTHER; note = 2-fluororibose uracil
  modified_base 5: mod_base = cm
  modified_base 6: mod_base = OTHER; note = 2-fluororibose uracil
  modified_base 7: mod_base = OTHER; note = 2-O-methylribose adenine
  modified_base 8: mod_base = OTHER; note = 2-fluororibose guanine
  modified_base 9: mod_base = gm
  modified_base 10: mod_base = OTHER; note = 2-fluororibose adenine
  modified_base 11: mod_base = um
  modified_base 12: mod_base = gm
  modified_base 13: mod_base = OTHER; note = 2-O-methylribose adenine
  modified_base 14: mod_base = OTHER; note = 2-fluororibose uracil
  modified_base 15: mod_base = gm
  modified_base 16: mod_base = OTHER; note = 2-fluororibose uracil
  modified_base 17: mod_base = um
  modified_base 18: mod_base = OTHER; note = 2-fluororibose cytosine
  modified_base 19: mod_base = OTHER; note = 2-O-methylribose adenine
  modified_base 19..20: mod_base = OTHER; note = phosphorothioate
  modified_base 20: mod_base = um
  modified_base 20..21: mod_base = OTHER; note = phosphorothioate
  modified_base 21: mod_base = um
  source 1..21: mol_type = other RNA
ttttctaggatgatgttcatt

SEQ ID NO: 21 - RNA, 21 nt, synthetic construct
  misc_feature 1..21: note = Synthetic: WV-38247
  misc_feature 1..21: note = Synthetic: SSR-0103627
  modified_base 1: mod_base = OTHER; note = 2-fluororibose uracil
  modified_base 1..2: mod_base = OTHER; note = phosphorothioate
  modified_base 2: mod_base = OTHER; note = 2-fluororibose adenine
  modified_base 2..3: mod_base = OTHER; note = phosphorothioate
  modified_base 3: mod_base = um
  modified_base 4: mod_base = OTHER; note = 2-fluororibose uracil
  modified_base 5: mod_base = um
  modified_base 6: mod_base = OTHER; note = 2-fluororibose cytosine
  modified_base 7: mod_base = um
  modified_base 8: mod_base = OTHER; note = 2-fluororibose adenine
  modified_base 9: mod_base = gm
  modified_base 10: mod_base = OTHER; note = 2-fluororibose guanine
  modified_base 11: mod_base = OTHER; note = 2-O-methylribose adenine
  modified_base 12: mod_base = um
  modified_base 13: mod_base = gm
  modified_base 14: mod_base = OTHER; note = 2-fluororibose adenine
  modified_base 15: mod_base = um
  modified_base 16: mod_base = OTHER; note = 2-fluororibose guanine
  modified_base 17: mod_base = um
  modified_base 18: mod_base = OTHER; note = 2-fluororibose uracil
  modified_base 19: mod_base = cm
  modified_base 19..20: mod_base = OTHER; note = phosphorothioate
  modified_base 20: mod_base = um
  modified_base 20..21: mod_base = OTHER; note = phosphorothioate
  modified_base 21: mod_base = um
  source 1..21: mol_type = other RNA
tatttctaggatgatgttctt

SEQ ID NO: 22 - RNA, 21 nt, synthetic construct
  misc_feature 1..21: note = Synthetic: WV-38248
  misc_feature 1..21: note = Synthetic: SSR-0103606
  modified_base 1: mod_base = OTHER; note = 2-fluororibose uracil
  modified_base 1..2: mod_base = OTHER; note = phosphorothioate
  modified_base 2: mod_base = OTHER; note = 2-fluororibose adenine
  modified_base 2..3: mod_base = OTHER; note = phosphorothioate
  modified_base 3: mod_base = gm
  modified_base 4: mod_base = OTHER; note = 2-fluororibose guanine
  modified_base 5: mod_base = OTHER; note = 2-O-methylribose adenine
  modified_base 6: mod_base = OTHER; note = 2-fluororibose uracil
  modified_base 7: mod_base = um
  modified_base 8: mod_base = OTHER; note = 2-fluororibose uracil
  modified_base 9: mod_base = cm
  modified_base 10: mod_base = OTHER; note = 2-fluororibose uracil
  modified_base 11: mod_base = OTHER; note = 2-O-methylribose adenine
  modified_base 12: mod_base = gm
  modified_base 13: mod_base = gm
  modified_base 14: mod_base = OTHER; note = 2-fluororibose adenine
  modified_base 15: mod_base = um
  modified_base 16: mod_base = OTHER; note = 2-fluororibose guanine
  modified_base 17: mod_base = OTHER; note = 2-O-methylribose adenine
  modified_base 18: mod_base = OTHER; note = 2-fluororibose uracil
  modified_base 19: mod_base = gm
  modified_base 19..20: mod_base = OTHER; note = phosphorothioate
  modified_base 20: mod_base = um
  modified_base 20..21: mod_base = OTHER; note = phosphorothioate
  modified_base 21: mod_base = um
  source 1..21: mol_type = other RNA
taggatttctaggatgatgtt

SEQ ID NO: 23 - RNA, 21 nt, synthetic construct
  misc_feature 1..21: note = Synthetic: WV-38249
  misc_feature 1..21: note = Synthetic: SSR-0103599
  modified_base 1: mod_base = OTHER; note = 2-fluororibose uracil
  modified_base 1..2: mod_base = OTHER; note = phosphorothioate
  modified_base 2: mod_base = OTHER; note = 2-fluororibose adenine
  modified_base 2..3: mod_base = OTHER; note = phosphorothioate
  modified_base 3: mod_base = gm
  modified_base 4: mod_base = OTHER; note = 2-fluororibose cytosine
  modified_base 5: mod_base = OTHER; note = 2-O-methylribose adenine
  modified_base 6: mod_base = OTHER; note = 2-fluororibose guanine
  modified_base 7: mod_base = OTHER; note = 2-O-methylribose adenine
  modified_base 8: mod_base = OTHER; note = 2-fluororibose adenine
  modified_base 9: mod_base = gm
  modified_base 10: mod_base = OTHER; note = 2-fluororibose guanine
  modified_base 11: mod_base = OTHER; note = 2-O-methylribose adenine
  modified_base 12: mod_base = um
  modified_base 13: mod_base = um
  modified_base 14: mod_base = OTHER; note = 2-fluororibose uracil
  modified_base 15: mod_base = cm
  modified_base 16: mod_base = OTHER; note = 2-fluororibose uracil
  modified_base 17: mod_base = OTHER; note = 2-O-methylribose adenine
  modified_base 18: mod_base = OTHER; note = 2-fluororibose guanine
  modified_base 19: mod_base = gm
  modified_base 19..20: mod_base = OTHER; note = phosphorothioate
  modified_base 20: mod_base = um
  modified_base 20..21: mod_base = OTHER; note = phosphorothioate
  modified_base 21: mod_base = um
  source 1..21: mol_type = other RNA
tagcagaaggatttctaggtt

SEQ ID NO: 24 - RNA, 21 nt, synthetic construct
  misc_feature 1..21: note = Synthetic: WV-38250
  misc_feature 1..21: note = Synthetic: SSR-0103663
  modified_base 1: mod_base = OTHER; note = 2-fluororibose uracil
  modified_base 1..2: mod_base = OTHER; note = phosphorothioate
  modified_base 2: mod_base = OTHER; note = 2-fluororibose guanine
  modified_base 2..3: mod_base = OTHER; note = phosphorothioate
  modified_base 3: mod_base = OTHER; note = 2-O-methylribose adenine
  modified_base 4: mod_base = OTHER; note = 2-fluororibose adenine
  modified_base 5: mod_base = gm
  modified_base 6: mod_base = OTHER; note = 2-fluororibose cytosine
  modified_base 7: mod_base = OTHER; note = 2-O-methylribose adenine
  modified_base 8: mod_base = OTHER; note = 2-fluororibose guanine
  modified_base 9: mod_base = OTHER; note = 2-O-methylribose adenine
  modified_base 10: mod_base = OTHER; note = 2-fluororibose adenine
  modified_base 11: mod_base = gm
  modified_base 12: mod_base = gm
  modified_base 13: mod_base = OTHER; note = 2-O-methylribose adenine
  modified_base 14: mod_base = OTHER; note = 2-fluororibose uracil
  modified_base 15: mod_base = um
  modified_base 16: mod_base = OTHER; note = 2-fluororibose uracil
  modified_base 17: mod_base = cm
  modified_base 18: mod_base = OTHER; note = 2-fluororibose uracil
  modified_base 19: mod_base = OTHER; note = 2-O-methylribose adenine
  modified_base 19..20: mod_base = OTHER; note = phosphorothioate
  modified_base 20: mod_base = um
  modified_base 20..21: mod_base = OTHER; note = phosphorothioate
  modified_base 21: mod_base = um
  source 1..21: mol_type = other RNA
tgaagcagaaggatttctatt

SEQ ID NO: 25 - RNA, 21 nt, synthetic construct
  misc_feature 1..21: note = Synthetic: WV-38251
  misc_feature 1..21: note = Synthetic: SSR-0103631
  modified_base 1: mod_base = OTHER; note = 2-fluororibose uracil
  modified_base 1..2: mod_base = OTHER; note = phosphorothioate
  modified_base 2: mod_base = OTHER; note = 2-fluororibose cytosine
  modified_base 2..3: mod_base = OTHER; note = phosphorothioate
  modified_base 3: mod_base = OTHER; note = 2-O-methylribose adenine
  modified_base 4: mod_base = OTHER; note = 2-fluororibose guanine
  modified_base 5: mod_base = OTHER; note = 2-O-methylribose adenine
  modified_base 6: mod_base = OTHER; note = 2-fluororibose adenine
  modified_base 7: mod_base = gm
  modified_base 8: mod_base = OTHER; note = 2-fluororibose cytosine
  modified_base 9: mod_base = OTHER; note = 2-O-methylribose adenine
  modified_base 10: mod_base = OTHER; note = 2-fluororibose guanine
  modified_base 11: mod_base = OTHER; note = 2-O-methylribose adenine
  modified_base 12: mod_base = OTHER; note = 2-O-methylribose adenine
  modified_base 13: mod_base = gm
  modified_base 14: mod_base = OTHER; note = 2-fluororibose guanine
  modified_base 15: mod_base = OTHER; note = 2-O-methylribose adenine
  modified_base 16: mod_base = OTHER; note = 2-fluororibose uracil
  modified_base 17: mod_base = um
  modified_base 18: mod_base = OTHER; note = 2-fluororibose uracil
  modified_base 19: mod_base = cm
  modified_base 19..20: mod_base = OTHER; note = phosphorothioate
  modified_base 20: mod_base = um
  modified_base 20..21: mod_base = OTHER; note = phosphorothioate
  modified_base 21: mod_base = um
  source 1..21: mol_type = other RNA
tcagaagcagaaggatttctt

SEQ ID NO: 26 - RNA, 21 nt, synthetic construct
  misc_feature 1..21: note = Synthetic: WV-38252
  misc_feature 1..21: note = Synthetic: SSR-0103707
  modified_base 1: mod_base = OTHER; note = 2-fluororibose uracil
  modified_base 1..2: mod_base = OTHER; note = phosphorothioate
  modified_base 2: mod_base = OTHER; note = 2-fluororibose uracil
  modified_base 2..3: mod_base = OTHER; note = phosphorothioate
  modified_base 3: mod_base = cm
  modified_base 4: mod_base = OTHER; note = 2-fluororibose adenine
  modified_base 5: mod_base = gm
  modified_base 6: mod_base = OTHER; note = 2-fluororibose adenine
  modified_base 7: mod_base = OTHER; note = 2-O-methylribose adenine
  modified_base 8: mod_base = OTHER; note = 2-fluororibose guanine
  modified_base 9: mod_base = cm
  modified_base 10: mod_base = OTHER; note = 2-fluororibose adenine
  modified_base 11: mod_base = gm
  modified_base 12: mod_base = OTHER; note = 2-O-methylribose adenine
  modified_base 13: mod_base = OTHER; note = 2-O-methylribose adenine
  modified_base 14: mod_base = OTHER; note = 2-fluororibose guanine
  modified_base 15: mod_base = gm
  modified_base 16: mod_base = OTHER; note = 2-fluororibose adenine
  modified_base 17: mod_base = um
  modified_base 18: mod_base = OTHER; note = 2-fluororibose uracil
  modified_base 19: mod_base = um
  modified_base 19..20: mod_base = OTHER; note = phosphorothioate
  modified_base 20: mod_base = um
  modified_base 20..21: mod_base = OTHER; note = phosphorothioate
  modified_base 21: mod_base = um
  source 1..21: mol_type = other RNA
ttcagaagcagaaggattttt

SEQ ID NO: 27 - RNA, 21 nt, synthetic construct
  misc_feature 1..21: note = Synthetic: WV-38253
  misc_feature 1..21: note = Synthetic: SSR-0103669
  modified_base 1: mod_base = OTHER; note = 2-fluororibose uracil
  modified_base 1..2: mod_base = OTHER; note = phosphorothioate
  modified_base 2: mod_base = OTHER; note = 2-fluororibose guanine
  modified_base 2..3: mod_base = OTHER; note = phosphorothioate
  modified_base 3: mod_base = OTHER; note = 2-O-methylribose adenine
  modified_base 4: mod_base = OTHER; note = 2-fluororibose uracil
  modified_base 5: mod_base = cm
  modified_base 6: mod_base = OTHER; note = 2-fluororibose adenine
  modified_base 7: mod_base = gm
  modified_base 8: mod_base = OTHER; note = 2-fluororibose adenine
  modified_base 9: mod_base = OTHER; note = 2-O-methylribose adenine
  modified_base 10: mod_base = OTHER; note = 2-fluororibose guanine
  modified_base 11: mod_base = cm
  modified_base 12: mod_base = OTHER; note = 2-O-methylribose adenine
  modified_base 13: mod_base = gm
  modified_base 14: mod_base = OTHER; note = 2-fluororibose adenine
  modified_base 15: mod_base = OTHER; note = 2-O-methylribose adenine
  modified_base 16: mod_base = OTHER; note = 2-fluororibose guanine
  modified_base 17: mod_base = gm
  modified_base 18: mod_base = OTHER; note = 2-fluororibose adenine
  modified_base 19: mod_base = um
  modified_base 19..20: mod_base = OTHER; note = phosphorothioate
  modified_base 20: mod_base = um
  modified_base 20..21: mod_base = OTHER; note = phosphorothioate
  modified_base 21: mod_base = um
  source 1..21: mol_type = other RNA
tgatcagaagcagaaggattt

SEQ ID NO: 28 - RNA, 21 nt, synthetic construct
  misc_feature 1..21: note = Synthetic: WV-38254
  misc_feature 1..21: note = Synthetic: SSR-0103681
  modified_base 1: mod_base = OTHER; note = 2-fluororibose uracil
  modified_base 1..2: mod_base = OTHER; note = phosphorothioate
  modified_base 2: mod_base = OTHER; note = 2-fluororibose guanine
  modified_base 2..3: mod_base = OTHER; note = phosphorothioate
  modified_base 3: mod_base = gm
  modified_base 4: mod_base = OTHER; note = 2-fluororibose uracil
  modified_base 5: mod_base = gm
  modified_base 6: mod_base = OTHER; note = 2-fluororibose adenine
  modified_base 7: mod_base = um
  modified_base 8: mod_base = OTHER; note = 2-fluororibose cytosine
  modified_base 9: mod_base = OTHER; note = 2-O-methylribose adenine
  modified_base 10: mod_base = OTHER; note = 2-fluororibose guanine
  modified_base 11: mod_base = OTHER; note = 2-O-methylribose adenine
  modified_base 12: mod_base = OTHER; note = 2-O-methylribose adenine
  modified_base 13: mod_base = gm
  modified_base 14: mod_base = OTHER; note = 2-fluororibose cytosine
  modified_base 15: mod_base = OTHER; note = 2-O-methylribose adenine
  modified_base 16: mod_base = OTHER; note = 2-fluororibose guanine
  modified_base 17: mod_base = OTHER; note = 2-O-methylribose adenine
  modified_base 18: mod_base = OTHER; note = 2-fluororibose adenine
  modified_base 19: mod_base = gm
  modified_base 19..20: mod_base = OTHER; note = phosphorothioate
  modified_base 20: mod_base = um
  modified_base 20..21: mod_base = OTHER; note = phosphorothioate
  modified_base 21: mod_base = um
  source 1..21: mol_type = other RNA
tggtgatcagaagcagaagtt

SEQ ID NO: 29 - RNA, 21 nt, synthetic construct
  misc_feature 1..21: note = Synthetic: WV-38255
  misc_feature 1..21: note = Synthetic: SSR-0103672
  modified_base 1: mod_base = OTHER; note = 2-fluororibose uracil
  modified_base 1..2: mod_base = OTHER; note = phosphorothioate
  modified_base 2: mod_base = OTHER; note = 2-fluororibose guanine
  modified_base 2..3: mod_base = OTHER; note = phosphorothioate
  modified_base 3: mod_base = OTHER; note = 2-O-methylribose adenine
  modified_base 4: mod_base = OTHER; note = 2-fluororibose uracil
  modified_base 5: mod_base = gm
  modified_base 6: mod_base = OTHER; note = 2-fluororibose guanine
  modified_base 7: mod_base = um
  modified_base 8: mod_base = OTHER; note = 2-fluororibose guanine
  modified_base 9: mod_base = OTHER; note = 2-O-methylribose adenine
  modified_base 10: mod_base = OTHER; note = 2-fluororibose uracil
  modified_base 11: mod_base = cm
  modified_base 12: mod_base = OTHER; note = 2-O-methylribose adenine
  modified_base 13: mod_base = gm
  modified_base 14: mod_base = OTHER; note = 2-fluororibose adenine
  modified_base 15: mod_base = OTHER; note = 2-O-methylribose adenine
  modified_base 16: mod_base = OTHER; note = 2-fluororibose guanine
  modified_base 17: mod_base = cm
  modified_base 18: mod_base = OTHER; note = 2-fluororibose adenine
  modified_base 19: mod_base = gm
  modified_base 19..20: mod_base = OTHER; note = phosphorothioate
  modified_base 20: mod_base = um
  modified_base 20..21: mod_base = OTHER; note = phosphorothioate
  modified_base 21: mod_base = um
  source 1..21: mol_type = other RNA
tgatggtgatcagaagcagtt

SEQ ID NO: 30 - RNA, 21 nt, synthetic construct
  misc_feature 1..21: note = Synthetic: WV-38256
  misc_feature 1..21: note = Synthetic: SSR-0103725
  modified_base 1: mod_base = OTHER; note = 2-fluororibose uracil
  modified_base 1..2: mod_base = OTHER; note = phosphorothioate
  modified_base 2: mod_base = OTHER; note = 2-fluororibose uracil
  modified_base 2..3: mod_base = OTHER; note = phosphorothioate
  modified_base 3: mod_base = gm
  modified_base 4: mod_base = OTHER; note = 2-fluororibose adenine
  modified_base 5: mod_base = um
  modified_base 6: mod_base = OTHER; note = 2-fluororibose guanine
  modified_base 7: mod_base = gm
  modified_base 8: mod_base = OTHER; note = 2-fluororibose uracil
  modified_base 9: mod_base = gm
  modified_base 10: mod_base = OTHER; note = 2-fluororibose adenine
  modified_base 11: mod_base = um
  modified_base 12: mod_base = cm
  modified_base 13: mod_base = OTHER; note = 2-O-methylribose adenine
  modified_base 14: mod_base = OTHER; note = 2-fluororibose guanine
  modified_base 15: mod_base = OTHER; note = 2-O-methylribose adenine
  modified_base 16: mod_base = OTHER; note = 2-fluororibose adenine
  modified_base 17: mod_base = gm
  modified_base 18: mod_base = OTHER; note = 2-fluororibose cytosine
  modified_base 19: mod_base = OTHER; note = 2-O-methylribose adenine
  modified_base 19..20: mod_base = OTHER; note = phosphorothioate
  modified_base 20: mod_base = um
  modified_base 20..21: mod_base = OTHER; note = phosphorothioate
  modified_base 21: mod_base = um
  source 1..21: mol_type = other RNA
ttgatggtgatcagaagcatt

SEQ ID NO: 31 - RNA, 21 nt, synthetic construct
  misc_feature 1..21: note = Synthetic: WV-38257
  misc_feature 1..21: note = Synthetic: SSR-0103621
  modified_base 1: mod_base = OTHER; note = 2-fluororibose uracil
  modified_base 1..2: mod_base = OTHER; note = phosphorothioate
  modified_base 2: mod_base = OTHER; note = 2-fluororibose adenine
  modified_base 2..3: mod_base = OTHER; note = phosphorothioate
  modified_base 3: mod_base = um
  modified_base 4: mod_base = OTHER; note = 2-fluororibose guanine
  modified_base 5: mod_base = OTHER; note = 2-O-methylribose adenine
  modified_base 6: mod_base = OTHER; note = 2-fluororibose uracil
  modified_base 7: mod_base = gm
  modified_base 8: mod_base = OTHER; note = 2-fluororibose guanine
  modified_base 9: mod_base = um
  modified_base 10: mod_base = OTHER; note = 2-fluororibose guanine
  modified_base 11: mod_base = OTHER; note = 2-O-methylribose adenine
  modified_base 12: mod_base = um
  modified_base 13: mod_base = cm
  modified_base 14: mod_base = OTHER; note = 2-fluororibose adenine
  modified_base 15: mod_base = gm
  modified_base 16: mod_base = OTHER; note = 2-fluororibose adenine
  modified_base 17: mod_base = OTHER; note = 2-O-methylribose adenine
  modified_base 18: mod_base = OTHER; note = 2-fluororibose guanine
  modified_base 19: mod_base = cm
  modified_base 19..20: mod_base = OTHER; note = phosphorothioate
  modified_base 20: mod_base = um
  modified_base 20..21: mod_base = OTHER; note = phosphorothioate
  modified_base 21: mod_base = um
  source 1..21: mol_type = other RNA
tatgatggtgatcagaagctt

SEQ ID NO: 32 - RNA, 21 nt, synthetic construct
  misc_feature 1..21: note = Synthetic: WV-38258
  misc_feature 1..21: note = Synthetic: SSR-0103598
  modified_base 1: mod_base = OTHER; note = 2-fluororibose uracil
  modified_base 1..2: mod_base = OTHER; note = phosphorothioate
  modified_base 2: mod_base = OTHER; note = 2-fluororibose adenine
  modified_base 2..3: mod_base = OTHER; note = phosphorothioate
  modified_base 3: mod_base = gm
  modified_base 4: mod_base = OTHER; note = 2-fluororibose adenine
  modified_base 5: mod_base = um
  modified_base 6: mod_base = OTHER; note = 2-fluororibose guanine
  modified_base 7: mod_base = OTHER; note = 2-O-methylribose adenine
  modified_base 8: mod_base = OTHER; note = 2-fluororibose uracil
  modified_base 9: mod_base = gm
  modified_base 10: mod_base = OTHER; note = 2-fluororibose guanine
  modified_base 11: mod_base = um
  modified_base 12: mod_base = gm
  modified_base 13: mod_base = OTHER; note = 2-O-methylribose adenine
  modified_base 14: mod_base = OTHER; note = 2-fluororibose uracil
  modified_base 15: mod_base = cm
  modified_base 16: mod_base = OTHER; note = 2-fluororibose adenine
  modified_base 17: mod_base = gm
  modified_base 18: mod_base = OTHER; note = 2-fluororibose adenine
  modified_base 19: mod_base = OTHER; note = 2-O-methylribose adenine
  modified_base 19..20: mod_base = OTHER; note = phosphorothioate
  modified_base 20: mod_base = um
  modified_base 20..21: mod_base = OTHER; note = phosphorothioate
  modified_base 21: mod_base = um
  source 1..21: mol_type = other RNA
tagatgatggtgatcagaatt

SEQ ID NO: 33 - RNA, 21 nt, synthetic construct
  misc_feature 1..21: note = Synthetic: WV-38259
  misc_feature 1..21: note = Synthetic: SSR-0103603
  modified_base 1: mod_base = OTHER; note = 2-fluororibose uracil
  modified_base 1..2: mod_base = OTHER; note = phosphorothioate
  modified_base 2: mod_base = OTHER; note = 2-fluororibose adenine
  modified_base 2..3: mod_base = OTHER; note = phosphorothioate
  modified_base 3: mod_base = gm
  modified_base 4: mod_base = OTHER; note = 2-fluororibose guanine
  modified_base 5: mod_base = OTHER; note = 2-O-methylribose adenine
  modified_base 6: mod_base = OTHER; note = 2-fluororibose guanine
  modified_base 7: mod_base = um
  modified_base 8: mod_base = OTHER; note = 2-fluororibose adenine
  modified_base 9: mod_base = gm
  modified_base 10: mod_base = OTHER; note = 2-fluororibose adenine
  modified_base 11: mod_base = um
  modified_base 12: mod_base = gm
  modified_base 13: mod_base = OTHER; note = 2-O-methylribose adenine
  modified_base 14: mod_base = OTHER; note = 2-fluororibose uracil
  modified_base 15: mod_base = gm
  modified_base 16: mod_base = OTHER; note = 2-fluororibose guanine
  modified_base 17: mod_base = um
  modified_base 18: mod_base = OTHER; note = 2-fluororibose guanine
  modified_base 19: mod_base = OTHER; note = 2-O-methylribose adenine
  modified_base 19..20: mod_base = OTHER; note = phosphorothioate
  modified_base 20: mod_base = um
  modified_base 20..21: mod_base = OTHER; note = phosphorothioate
  modified_base 21: mod_base = um
  source 1..21: mol_type = other RNA
taggagtagatgatggtgatt

SEQ ID NO: 34 - RNA, 21 nt, synthetic construct
  misc_feature 1..21: note = Synthetic: WV-38260
  misc_feature 1..21: note = Synthetic: SSR-0103609
  modified_base 1: mod_base = OTHER; note = 2-fluororibose uracil
  modified_base 1..2: mod_base = OTHER; note = phosphorothioate
  modified_base 2: mod_base = OTHER; note = 2-fluororibose adenine
  modified_base 2..3: mod_base = OTHER; note = phosphorothioate
  modified_base 3: mod_base = gm
  modified_base 4: mod_base = OTHER; note = 2-fluororibose uracil
  modified_base 5: mod_base = OTHER; note = 2-O-methylribose adenine
  modified_base 6: mod_base = OTHER; note = 2-fluororibose guanine
  modified_base 7: mod_base = gm
  modified_base 8: mod_base = OTHER; note = 2-fluororibose adenine
  modified_base 9: mod_base = gm
  modified_base 10: mod_base = OTHER; note = 2-fluororibose uracil
  modified_base 11: mod_base = OTHER; note = 2-O-methylribose adenine
  modified_base 12: mod_base = gm
  modified_base 13: mod_base = OTHER; note = 2-O-methylribose adenine
  modified_base 14: mod_base = OTHER; note = 2-fluororibose uracil
  modified_base 15: mod_base = gm
  modified_base 16: mod_base = OTHER; note = 2-fluororibose adenine
  modified_base 17: mod_base = um
  modified_base 18: mod_base = OTHER; note = 2-fluororibose guanine
  modified_base 19: mod_base = gm
  modified_base 19..20: mod_base = OTHER; note = phosphorothioate
  modified_base 20: mod_base = um
  modified_base 20..21: mod_base = OTHER; note = phosphorothioate
  modified_base 21: mod_base = um
  source 1..21: mol_type = other RNA
tagtaggagtagatgatggtt

SEQ ID NO: 35 - RNA, 21 nt, synthetic construct
  misc_feature 1..21: note = Synthetic: WV-38261
  misc_feature 1..21: note = Synthetic: SSR-0103578
  modified_base 1: mod_base = OTHER; note = 2-fluororibose uracil
  modified_base 1..2: mod_base = OTHER; note = phosphorothioate
  modified_base 2: mod_base = OTHER; note = 2-fluororibose adenine
  modified_base 2..3: mod_base = OTHER; note = phosphorothioate
  modified_base 3: mod_base = OTHER; note = 2-O-methylribose adenine
  modified_base 4: mod_base = OTHER; note = 2-fluororibose guanine
  modified_base 5: mod_base = um
  modified_base 6: mod_base = OTHER; note = 2-fluororibose adenine
  modified_base 7: mod_base = gm
  modified_base 8: mod_base = OTHER; note = 2-fluororibose guanine
  modified_base 9: mod_base = OTHER; note = 2-O-methylribose adenine
  modified_base 10: mod_base = OTHER; note = 2-fluororibose guanine
  modified_base 11: mod_base = um
  modified_base 12: mod_base = OTHER; note = 2-O-methylribose adenine
  modified_base 13: mod_base = gm
  modified_base 14: mod_base = OTHER; note = 2-fluororibose adenine
  modified_base 15: mod_base = um
  modified_base 16: mod_base = OTHER; note = 2-fluororibose guanine
  modified_base 17: mod_base = OTHER; note = 2-O-methylribose adenine
  modified_base 18: mod_base = OTHER; note = 2-fluororibose uracil
  modified_base 19: mod_base = gm
  modified_base 19..20: mod_base = OTHER; note = phosphorothioate
  modified_base 20: mod_base = um
  modified_base 20..21: mod_base = OTHER; note = phosphorothioate
  modified_base 21: mod_base = um
  source 1..21: mol_type = other RNA
taagtaggagtagatgatgtt

SEQ ID NO: 36 - RNA, 21 nt, synthetic construct
  misc_feature 1..21: note = Synthetic: WV-38262
  misc_feature 1..21: note = Synthetic: SSR-0103639
  modified_base 1: mod_base = OTHER; note = 2-fluororibose uracil
  modified_base 1..2: mod_base = OTHER; note = phosphorothioate
  modified_base 2: mod_base = OTHER; note = 2-fluororibose cytosine
  modified_base 2..3: mod_base = OTHER; note = phosphorothioate
  modified_base 3: mod_base = cm
  modified_base 4: mod_base = OTHER; note = 2-fluororibose adenine
  modified_base 5: mod_base = OTHER; note = 2-O-methylribose adenine
  modified_base 6: mod_base = OTHER; note = 2-fluororibose guanine
  modified_base 7: mod_base = um
  modified_base 8: mod_base = OTHER; note = 2-fluororibose adenine
  modified_base 9: mod_base = gm
  modified_base 10: mod_base = OTHER; note = 2-fluororibose guanine
  modified_base 11: mod_base = OTHER; note = 2-O-methylribose adenine
  modified_base 12: mod_base = gm
  modified_base 13: mod_base = um
  modified_base 14: mod_base = OTHER; note = 2-fluororibose adenine
  modified_base 15: mod_base = gm
  modified_base 16: mod_base = OTHER; note = 2-fluororibose adenine
  modified_base 17: mod_base = um
  modified_base 18: mod_base = OTHER; note = 2-fluororibose guanine
  modified_base 19: mod_base = OTHER; note = 2-O-methylribose adenine
  modified_base 19..20: mod_base = OTHER; note = phosphorothioate
  modified_base 20: mod_base = um
  modified_base 20..21: mod_base = OTHER; note = phosphorothioate
  modified_base 21: mod_base = um
  source 1..21: mol_type = other RNA
tccaagtaggagtagatgatt

SEQ ID NO: 37 - RNA, 21 nt, synthetic construct
  misc_feature 1..21: note = Synthetic: WV-38263
  misc_feature 1..21: note = Synthetic: SSR-0103591
  modified_base 1: mod_base = OTHER; note = 2-fluororibose uracil
  modified_base 1..2: mod_base = OTHER; note = phosphorothioate
  modified_base 2: mod_base = OTHER; note = 2-fluororibose adenine
  modified_base 2..3: mod_base = OTHER; note = phosphorothioate
  modified_base 3: mod_base = cm
  modified_base 4: mod_base = OTHER; note = 2-fluororibose guanine
  modified_base 5: mod_base = OTHER; note = 2-O-methylribose adenine
  modified_base 6: mod_base = OTHER; note = 2-fluororibose cytosine
  modified_base 7: mod_base = um
  modified_base 8: mod_base = OTHER; note = 2-fluororibose cytosine
  modified_base 9: mod_base = cm
  modified_base 10: mod_base = OTHER; note = 2-fluororibose adenine
  modified_base 11: mod_base = OTHER; note = 2-O-methylribose adenine
  modified_base 12: mod_base = gm
  modified_base 13: mod_base = um
  modified_base 14: mod_base = OTHER; note = 2-fluororibose adenine
  modified_base 15: mod_base = gm
  modified_base 16: mod_base = OTHER; note = 2-fluororibose guanine
  modified_base 17: mod_base = OTHER; note = 2-O-methylribose adenine
  modified_base 18: mod_base = OTHER; note = 2-fluororibose guanine
  modified_base 19: mod_base = um
  modified_base 19..20: mod_base = OTHER; note = phosphorothioate
  modified_base 20: mod_base = um
  modified_base 20..21: mod_base = OTHER; note = phosphorothioate
  modified_base 21: mod_base = um
  source 1..21: mol_type = other RNA
tacgactccaagtaggagttt

SEQ ID NO: 38 - RNA, 21 nt, synthetic construct
  misc_feature 1..21: note = Synthetic: WV-38264
  misc_feature 1..21: note = Synthetic: SSR-0103638
  modified_base 1: mod_base = OTHER; note = 2-fluororibose uracil
  modified_base 1..2: mod_base = OTHER; note = phosphorothioate
  modified_base 2: mod_base = OTHER; note = 2-fluororibose cytosine
  modified_base 2..3: mod_base = OTHER; note = phosphorothioate
  modified_base 3: mod_base = cm
  modified_base 4: mod_base = OTHER; note = 2-fluororibose adenine
  modified_base 5: mod_base = OTHER; note = 2-O-methylribose adenine
  modified_base 6: mod_base = OTHER; note = 2-fluororibose cytosine
  modified_base 7: mod_base = gm
  modified_base 8: mod_base = OTHER; note = 2-fluororibose adenine
  modified_base 9: mod_base = cm
  modified_base 10: mod_base = OTHER; note = 2-fluororibose uracil
  modified_base 11: mod_base = cm
  modified_base 12: mod_base = cm
  modified_base 13: mod_base = OTHER; note = 2-O-methylribose adenine
  modified_base 14: mod_base = OTHER; note = 2-fluororibose adenine
  modified_base 15: mod_base = gm
  modified_base 16: mod_base = OTHER; note = 2-fluororibose uracil
  modified_base 17: mod_base = OTHER; note = 2-O-methylribose adenine
  modified_base 18: mod_base = OTHER; note = 2-fluororibose guanine
  modified_base 19: mod_base = gm
  modified_base 19..20: mod_base = OTHER; note = phosphorothioate
  modified_base 20: mod_base = um
  modified_base 20..21: mod_base = OTHER; note = phosphorothioate
  modified_base 21: mod_base = um
  source 1..21: mol_type = other RNA
tccaacgactccaagtaggtt

SEQ ID NO: 39 - RNA, 21 nt, synthetic construct
  misc_feature 1..21: note = Synthetic: WV-38265
  misc_feature 1..21: note = Synthetic: SSR-0103647
  modified_base 1: mod_base = OTHER; note = 2-fluororibose uracil
  modified_base 1..2: mod_base = OTHER; note = phosphorothioate
  modified_base 2: mod_base = OTHER; note = 2-fluororibose cytosine
  modified_base 2..3: mod_base = OTHER; note = phosphorothioate
  modified_base 3: mod_base = um
  modified_base 4: mod_base = OTHER; note = 2-fluororibose guanine
  modified_base 5: mod_base = OTHER; note = 2-O-methylribose adenine
  modified_base 6: mod_base = OTHER; note = 2-fluororibose guanine
  modified_base 7: mod_base = gm
  modified_base 8: mod_base = OTHER; note = 2-fluororibose adenine
  modified_base 9: mod_base = OTHER; note = 2-O-methylribose adenine
  modified_base 10: mod_base = OTHER; note = 2-fluororibose uracil
  modified_base 11: mod_base = gm
  modified_base 12: mod_base = OTHER; note = 2-O-methylribose adenine
  modified_base 13: mod_base = OTHER; note = 2-O-methylribose adenine
  modified_base 14: mod_base = OTHER; note = 2-fluororibose adenine
  modified_base 15: mod_base = OTHER; note = 2-O-methylribose adenine
  modified_base 16: mod_base = OTHER; note = 2-fluororibose adenine
  modified_base 17: mod_base = cm
  modified_base 18: mod_base = OTHER; note = 2-fluororibose uracil
  modified_base 19: mod_base = um
  modified_base 19..20: mod_base = OTHER; note = phosphorothioate
  modified_base 20: mod_base = um
  modified_base 20..21: mod_base = OTHER; note = phosphorothioate
  modified_base 21: mod_base = um
  source 1..21: mol_type = other RNA
tctgaggaatgaaaaactttt

SEQ ID NO: 40 - RNA, 21 nt, synthetic construct
  misc_feature 1..21: note = Synthetic: WV-38266
  misc_feature 1..21: note = Synthetic: SSR-0103758
  modified_base 1: mod_base = OTHER; note = 2-fluororibose uracil
  modified_base 1..2: mod_base = OTHER; note = phosphorothioate
  modified_base 2: mod_base = OTHER; note = 2-fluororibose uracil
  modified_base 2..3: mod_base = OTHER; note = phosphorothioate
  modified_base 3: mod_base = um
  modified_base 4: mod_base = OTHER; note = 2-fluororibose uracil
  modified_base 5: mod_base = cm
  modified_base 6: mod_base = OTHER; note = 2-fluororibose uracil
  modified_base 7: mod_base = cm
  modified_base 8: mod_base = OTHER; note = 2-fluororibose cytosine
  modified_base 9: mod_base = um
  modified_base 10: mod_base = OTHER; note = 2-fluororibose cytosine
  modified_base 11: mod_base = um
  modified_base 12: mod_base = gm
  modified_base 13: mod_base = OTHER; note = 2-O-methylribose adenine
  modified_base 14: mod_base = OTHER; note = 2-fluororibose guanine
  modified_base 15: mod_base = gm
  modified_base 16: mod_base = OTHER; note = 2-fluororibose adenine
  modified_base 17: mod_base = OTHER; note = 2-O-methylribose adenine
  modified_base 18: mod_base = OTHER; note = 2-fluororibose uracil
  modified_base 19: mod_base = gm
  modified_base 19..20: mod_base = OTHER; note = phosphorothioate
  modified_base 20: mod_base = um
  modified_base 20..21: mod_base = OTHER; note = phosphorothioate
  modified_base 21: mod_base = um
  source 1..21: mol_type = other RNA
ttttctcctctgaggaatgtt

SEQ ID NO: 41 - RNA, 21 nt, synthetic construct
  misc_feature 1..21: note = Synthetic: WV-38267
  misc_feature 1..21: note = Synthetic: SSR-0103634
  modified_base 1: mod_base = OTHER; note = 2-fluororibose uracil
  modified_base 1..2: mod_base = OTHER; note = phosphorothioate
  modified_base 2: mod_base = OTHER; note = 2-fluororibose cytosine
  modified_base 2..3: mod_base = OTHER; note = phosphorothioate
  modified_base 3: mod_base = OTHER; note = 2-O-methylribose adenine
  modified_base 4: mod_base = OTHER; note = 2-fluororibose guanine
  modified_base 5: mod_base = OTHER; note = 2-O-methylribose adenine
  modified_base 6: mod_base = OTHER; note = 2-fluororibose uracil
  modified_base 7: mod_base = um
  modified_base 8: mod_base = OTHER; note = 2-fluororibose uracil
  modified_base 9: mod_base = um
  modified_base 10: mod_base = OTHER; note = 2-fluororibose cytosine
  modified_base 11: mod_base = um
  modified_base 12: mod_base = cm
  modified_base 13: mod_base = cm
  modified_base 14: mod_base = OTHER; note = 2-fluororibose uracil
  modified_base 15: mod_base = cm
  modified_base 16: mod_base = OTHER; note = 2-fluororibose uracil
  modified_base 17: mod_base = gm
  modified_base 18: mod_base = OTHER; note = 2-fluororibose adenine
  modified_base 19: mod_base = gm
  modified_base 19..20: mod_base = OTHER; note = phosphorothioate
  modified_base 20: mod_base = um
  modified_base 20..21: mod_base = OTHER; note = phosphorothioate
  modified_base 21: mod_base = um
  source 1..21: mol_type = other RNA
tcagattttctcctctgagtt

SEQ ID NO: 42 - RNA, 21 nt, synthetic construct
  misc_feature 1..21: note = Synthetic: WV-38268
  misc_feature 1..21: note = Synthetic: SSR-0103694
  modified_base 1: mod_base = OTHER; note = 2-fluororibose uracil
  modified_base 1..2: mod_base = OTHER; note = phosphorothioate
  modified_base 2: mod_base = OTHER; note = 2-fluororibose uracil
  modified_base 2..3: mod_base = OTHER; note = phosphorothioate
  modified_base 3: mod_base = OTHER; note = 2-O-methylribose adenine
  modified_base 4: mod_base = OTHER; note = 2-fluororibose adenine
  modified_base 5: mod_base = um
  modified_base 6: mod_base = OTHER; note = 2-fluororibose guanine
  modified_base 7: mod_base = OTHER; note = 2-O-methylribose adenine
  modified_base 8: mod_base = OTHER; note = 2-fluororibose guanine
  modified_base 9: mod_base = OTHER; note = 2-O-methylribose adenine
  modified_base 10: mod_base = OTHER; note = 2-fluororibose adenine
  modified_base 11: mod_base = cm
  modified_base 12: mod_base = OTHER; note = 2-O-methylribose adenine
  modified_base 13: mod_base = OTHER; note = 2-O-methylribose adenine
  modified_base 14: mod_base = OTHER; note = 2-fluororibose uracil
  modified_base 15: mod_base = cm
  modified_base 16: mod_base = OTHER; note = 2-fluororibose uracil
  modified_base 17: mod_base = cm
  modified_base 18: mod_base = OTHER; note = 2-fluororibose cytosine
  modified_base 19: mod_base = cm
  modified_base 19..20: mod_base = OTHER; note = phosphorothioate
  modified_base 20: mod_base = um
  modified_base 20..21: mod_base = OTHER; note = phosphorothioate
  modified_base 21: mod_base = um
  source 1..21: mol_type = other RNA
ttaatgagaacaatctccctt

SEQ ID NO: 43 - RNA, 21 nt, synthetic construct
  misc_feature 1..21: note = Synthetic: WV-38269
  misc_feature 1..21: note = Synthetic: SSR-0103682
  modified_base 1: mod_base = OTHER; note = 2-fluororibose uracil
  modified_base 1..2: mod_base = OTHER; note = phosphorothioate
  modified_base 2: mod_base = OTHER; note = 2-fluororibose guanine
  modified_base 2..3: mod_base = OTHER; note = phosphorothioate
  modified_base 3: mod_base = um
  modified_base 4: mod_base = OTHER; note = 2-fluororibose adenine
  modified_base 5: mod_base = OTHER; note = 2-O-methylribose adenine
  modified_base 6: mod_base = OTHER; note = 2-fluororibose uracil
  modified_base 7: mod_base = gm
  modified_base 8: mod_base = OTHER; note = 2-fluororibose adenine
  modified_base 9: mod_base = gm
  modified_base 10: mod_base = OTHER; note = 2-fluororibose adenine
  modified_base 11: mod_base = OTHER; note = 2-O-methylribose adenine
  modified_base 12: mod_base = cm
  modified_base 13: mod_base = OTHER; note = 2-O-methylribose adenine
  modified_base 14: mod_base = OTHER; note = 2-fluororibose adenine
  modified_base 15: mod_base = um
  modified_base 16: mod_base = OTHER; note = 2-fluororibose cytosine
  modified_base 17: mod_base = um
  modified_base 18: mod_base = OTHER; note = 2-fluororibose cytosine
  modified_base 19: mod_base = cm
  modified_base 19..20: mod_base = OTHER; note = phosphorothioate
  modified_base 20: mod_base = um
  modified_base 20..21: mod_base = OTHER; note = phosphorothioate
  modified_base 21: mod_base = um
  source 1..21: mol_type = other RNA
tgtaatgagaacaatctcctt

SEQ ID NO: 44 - RNA, 21 nt, synthetic construct
  misc_feature 1..21: note = Synthetic: WV-38270
  misc_feature 1..21: note = Synthetic: SSR-0103608
  modified_base 1: mod_base = OTHER; note = 2-fluororibose uracil
  modified_base 1..2: mod_base = OTHER; note = phosphorothioate
  modified_base 2: mod_base = OTHER; note = 2-fluororibose adenine
  modified_base 2..3: mod_base = OTHER; note = phosphorothioate
  modified_base 3: mod_base = gm
  modified_base 4: mod_base = OTHER; note = 2-fluororibose uracil
  modified_base 5: mod_base = OTHER; note = 2-O-methylribose adenine
  modified_base 6: mod_base = OTHER; note = 2-fluororibose adenine
  modified_base 7: mod_base = um
  modified_base 8: mod_base = OTHER; note = 2-fluororibose guanine
  modified_base 9: mod_base = OTHER; note = 2-O-methylribose adenine
  modified_base 10: mod_base = OTHER; note = 2-fluororibose guanine
  modified_base 11: mod_base = OTHER; note = 2-O-methylribose adenine
  modified_base 12: mod_base = OTHER; note = 2-O-methylribose adenine
  modified_base 13: mod_base = cm
  modified_base 14: mod_base = OTHER; note = 2-fluororibose adenine
  modified_base 15: mod_base = OTHER; note = 2-O-methylribose adenine
  modified_base 16: mod_base = OTHER; note = 2-fluororibose uracil
  modified_base 17: mod_base = cm
  modified_base 18: mod_base = OTHER; note = 2-fluororibose uracil
  modified_base 19: mod_base = cm
  modified_base 19..20: mod_base = OTHER; note = phosphorothioate
  modified_base 20: mod_base = um
  modified_base 20..21: mod_base = OTHER; note = phosphorothioate
  modified_base 21: mod_base = um
  source 1..21: mol_type = other RNA
tagtaatgagaacaatctctt

SEQ ID NO: 45 - RNA, 21 nt, synthetic construct
  misc_feature 1..21: note = Synthetic: WV-38271
  misc_feature 1..21: note = Synthetic: SSR-0103642
  modified_base 1: mod_base = OTHER; note = 2-fluororibose uracil
  modified_base 1..2: mod_base = OTHER; note = phosphorothioate
  modified_base 2: mod_base = OTHER; note = 2-fluororibose cytosine
  modified_base 2..3: mod_base = OTHER; note = phosphorothioate
  modified_base 3: mod_base = cm
  modified_base 4: mod_base = OTHER; note = 2-fluororibose adenine
  modified_base 5: mod_base = gm
  modified_base 6: mod_base = OTHER; note = 2-fluororibose uracil
  modified_base 7: mod_base = OTHER; note = 2-O-methylribose adenine
  modified_base 8: mod_base = OTHER; note = 2-fluororibose adenine
  modified_base 9: mod_base = um
  modified_base 10: mod_base = OTHER; note = 2-fluororibose guanine
  modified_base 11: mod_base = OTHER; note = 2-O-methylribose adenine
  modified_base 12: mod_base = gm
  modified_base 13: mod_base = OTHER; note = 2-O-methylribose adenine
  modified_base 14: mod_base = OTHER; note = 2-fluororibose adenine
  modified_base 15: mod_base = cm
  modified_base 16: mod_base = OTHER; note = 2-fluororibose adenine
  modified_base 17: mod_base = OTHER; note = 2-O-methylribose adenine
  modified_base 18: mod_base = OTHER; note = 2-fluororibose uracil
  modified_base 19: mod_base = cm
  modified_base 19..20: mod_base = OTHER; note = phosphorothioate
  modified_base 20: mod_base = um
  modified_base 20..21: mod_base = OTHER; note = phosphorothioate
  modified_base 21: mod_base = um
  source 1..21: mol_type = other RNA
tccagtaatgagaacaatctt

SEQ ID NO: 46 - RNA, 21 nt, synthetic construct
  misc_feature 1..21: note = Synthetic: WV-38272
  misc_feature 1..21: note = Synthetic: SSR-0103612
  modified_base 1: mod_base = OTHER; note = 2-fluororibose uracil
  modified_base 1..2: mod_base = OTHER; note = phosphorothioate
  modified_base 2: mod_base = OTHER; note = 2-fluororibose adenine
  modified_base 2..3: mod_base = OTHER; note = phosphorothioate
  modified_base 3: mod_base = gm
  modified_base 4: mod_base = OTHER; note = 2-fluororibose uracil
  modified_base 5: mod_base = cm
  modified_base 6: mod_base = OTHER; note = 2-fluororibose uracil
  modified_base 7: mod_base = gm
  modified_base 8: mod_base = OTHER; note = 2-fluororibose cytosine
  modified_base 9: mod_base = cm
  modified_base 10: mod_base = OTHER; note = 2-fluororibose uracil
  modified_base 11: mod_base = gm
  modified_base 12: mod_base = cm
  modified_base 13: mod_base = cm
  modified_base 14: mod_base = OTHER; note = 2-fluororibose uracil
  modified_base 15: mod_base = OTHER; note = 2-O-methylribose adenine
  modified_base 16: mod_base = OTHER; note = 2-fluororibose uracil
  modified_base 17: mod_base = um
  modified_base 18: mod_base = OTHER; note = 2-fluororibose cytosine
  modified_base 19: mod_base = cm
  modified_base 19..20: mod_base = OTHER; note = phosphorothioate
  modified_base 20: mod_base = um
  modified_base 20..21: mod_base = OTHER; note = phosphorothioate
  modified_base 21: mod_base = um
  source 1..21: mol_type = other RNA
tagtctgcctgcctattcctt

SEQ ID NO: 47 - RNA, 21 nt, synthetic construct
  misc_feature 1..21: note = Synthetic: WV-38273
  misc_feature 1..21: note = Synthetic: SSR-0103701
  modified_base 1: mod_base = OTHER; note = 2-fluororibose uracil
  modified_base 1..2: mod_base = OTHER; note = phosphorothioate
  modified_base 2: mod_base = OTHER; note = 2-fluororibose uracil
  modified_base 2..3: mod_base = OTHER; note = phosphorothioate
  modified_base 3: mod_base = OTHER; note = 2-O-methylribose adenine
  modified_base 4: mod_base = OTHER; note = 2-fluororibose guanine
  modified_base 5: mod_base = um
  modified_base 6: mod_base = OTHER; note = 2-fluororibose cytosine
  modified_base 7: mod_base = um
  modified_base 8: mod_base = OTHER; note = 2-fluororibose guanine
  modified_base 9: mod_base = cm
  modified_base 10: mod_base = OTHER; note = 2-fluororibose cytosine
  modified_base 11: mod_base = um
  modified_base 12: mod_base = gm
  modified_base 13: mod_base = cm
  modified_base 14: mod_base = OTHER; note = 2-fluororibose cytosine
  modified_base 15: mod_base = um
  modified_base 16: mod_base = OTHER; note = 2-fluororibose adenine
  modified_base 17: mod_base = um
  modified_base 18: mod_base = OTHER; note = 2-fluororibose uracil
  modified_base 19: mod_base = cm
  modified_base 19..20: mod_base = OTHER; note = phosphorothioate
  modified_base 20: mod_base = um
  modified_base 20..21: mod_base = OTHER; note = phosphorothioate
  modified_base 21: mod_base = um
  source 1..21: mol_type = other RNA
ttagtctgcctgcctattctt

SEQ ID NO: 48 - RNA, 21 nt, synthetic construct
  misc_feature 1..21: note = Synthetic: WV-38274
  misc_feature 1..21: note = Synthetic: SSR-0103738
  modified_base 1: mod_base = OTHER; note = 2-fluororibose uracil
  modified_base 1..2: mod_base = OTHER; note = phosphorothioate
  modified_base 2: mod_base = OTHER; note = 2-fluororibose uracil
  modified_base 2..3: mod_base = OTHER; note = phosphorothioate
  modified_base 3: mod_base = um
  modified_base 4: mod_base = OTHER; note = 2-fluororibose adenine
  modified_base 5: mod_base = OTHER; note = 2-O-methylribose adenine
  modified_base 6: mod_base = OTHER; note = 2-fluororibose uracil
  modified_base 7: mod_base = OTHER; note = 2-O-methylribose adenine
  modified_base 8: mod_base = OTHER; note = 2-fluororibose uracil
  modified_base 9: mod_base = cm
  modified_base 10: mod_base = OTHER; note = 2-fluororibose cytosine
  modified_base 11: mod_base = cm
  modified_base 12: mod_base = OTHER; note = 2-O-methylribose adenine
  modified_base 13: mod_base = cm
  modified_base 14: mod_base = OTHER; note = 2-fluororibose adenine
  modified_base 15: mod_base = gm
  modified_base 16: mod_base = OTHER; note = 2-fluororibose adenine
  modified_base 17: mod_base = OTHER; note = 2-O-methylribose adenine
  modified_base 18: mod_base = OTHER; note = 2-fluororibose cytosine
  modified_base 19: mod_base = cm
  modified_base 19..20: mod_base = OTHER; note = phosphorothioate
  modified_base 20: mod_base = um
  modified_base 20..21: mod_base = OTHER; note = phosphorothioate
  modified_base 21: mod_base = um
  source 1..21: mol_type = other RNA
tttaatatcccacagaacctt

SEQ ID NO: 49 - RNA, 21 nt, synthetic construct
  misc_feature 1..21: note = Synthetic: WV-38275
  misc_feature 1..21: note = Synthetic: SSR-0103630
  modified_base 1: mod_base = OTHER; note = 2-fluororibose uracil
  modified_base 1..2: mod_base = OTHER; note = phosphorothioate
  modified_base 2: mod_base = OTHER; note = 2-fluororibose cytosine
  modified_base 2..3: mod_base = OTHER; note = phosphorothioate
  modified_base 3: mod_base = OTHER; note = 2-O-methylribose adenine
  modified_base 4: mod_base = OTHER; note = 2-fluororibose cytosine
  modified_base 5: mod_base = cm
  modified_base 6: mod_base = OTHER; note = 2-fluororibose cytosine
  modified_base 7: mod_base = OTHER; note = 2-O-methylribose adenine
  modified_base 8: mod_base = OTHER; note = 2-fluororibose cytosine
  modified_base 9: mod_base = um
  modified_base 10: mod_base = OTHER; note = 2-fluororibose uracil
  modified_base 11: mod_base = cm
  modified_base 12: mod_base = um
  modified_base 13: mod_base = um
  modified_base 14: mod_base = OTHER; note = 2-fluororibose uracil
  modified_base 15: mod_base = cm
  modified_base 16: mod_base = OTHER; note = 2-fluororibose uracil
  modified_base 17: mod_base = um
  modified_base 18: mod_base = OTHER; note = 2-fluororibose cytosine
  modified_base 19: mod_base = OTHER; note = 2-O-methylribose adenine
  modified_base 19..20: mod_base = OTHER; note = phosphorothioate
  modified_base 20: mod_base = um
  modified_base 20..21: mod_base = OTHER; note = phosphorothioate
  modified_base 21: mod_base = um
  source 1..21: mol_type = other RNA
tcacccacttctttcttcatt

SEQ ID NO: 50 - RNA, 21 nt, synthetic construct
  misc_feature 1..21: note = Synthetic: WV-38276
  misc_feature 1..21: note = Synthetic: SSR-0103706
  modified_base 1: mod_base = OTHER; note = 2-fluororibose uracil
  modified_base 1..2: mod_base = OTHER; note = phosphorothioate
  modified_base 2: mod_base = OTHER; note = 2-fluororibose uracil
  modified_base 2..3: mod_base = OTHER; note = phosphorothioate
  modified_base 3: mod_base = cm
  modified_base 4: mod_base = OTHER; note = 2-fluororibose adenine
  modified_base 5: mod_base = cm
  modified_base 6: mod_base = OTHER; note = 2-fluororibose cytosine
  modified_base 7: mod_base = cm
  modified_base 8: mod_base = OTHER; note = 2-fluororibose adenine
  modified_base 9: mod_base = cm
  modified_base 10: mod_base = OTHER; note = 2-fluororibose uracil
  modified_base 11: mod_base = um
  modified_base 12: mod_base = cm
  modified_base 13: mod_base = um
  modified_base 14: mod_base = OTHER; note = 2-fluororibose uracil
  modified_base 15: mod_base = um
  modified_base 16: mod_base = OTHER; note = 2-fluororibose cytosine
  modified_base 17: mod_base = um
  modified_base 18: mod_base = OTHER; note = 2-fluororibose uracil
  modified_base 19: mod_base = cm
  modified_base 19..20: mod_base = OTHER; note = phosphorothioate
  modified_base 20: mod_base = um
  modified_base 20..21: mod_base = OTHER; note = phosphorothioate
  modified_base 21: mod_base = um
  source 1..21: mol_type = other RNA
ttcacccacttctttcttctt

SEQ ID NO: 51 - RNA, 21 nt, synthetic construct
  misc_feature 1..21: note = Synthetic: WV-38277
  misc_feature 1..21: note = Synthetic: SSR-0103589
  modified_base 1: mod_base = OTHER; note = 2-fluororibose uracil
  modified_base 1..2: mod_base = OTHER; note = phosphorothioate
  modified_base 2: mod_base = OTHER; note = 2-fluororibose adenine
  modified_base 2..3: mod_base = OTHER; note = phosphorothioate
  modified_base 3: mod_base = cm
  modified_base 4: mod_base = OTHER; note = 2-fluororibose adenine
  modified_base 5: mod_base = um
  modified_base 6: mod_base = OTHER; note = 2-fluororibose cytosine
  modified_base 7: mod_base = OTHER; note = 2-O-methylribose adenine
  modified_base 8: mod_base = OTHER; note = 2-fluororibose cytosine
  modified_base 9: mod_base = cm
  modified_base 10: mod_base = OTHER; note = 2-fluororibose cytosine
  modified_base 11: mod_base = OTHER; note = 2-O-methylribose adenine
  modified_base 12: mod_base = cm
  modified_base 13: mod_base = um
  modified_base 14: mod_base = OTHER; note = 2-fluororibose uracil
  modified_base 15: mod_base = cm
  modified_base 16: mod_base = OTHER; note = 2-fluororibose uracil
  modified_base 17: mod_base = um
  modified_base 18: mod_base = OTHER; note = 2-fluororibose uracil
  modified_base 19: mod_base = cm
  modified_base 19..20: mod_base = OTHER; note = phosphorothioate
  modified_base 20: mod_base = um
  modified_base 20..21: mod_base = OTHER; note = phosphorothioate
  modified_base 21: mod_base = um
  source 1..21: mol_type = other RNA
tacatcacccacttctttctt

SEQ ID NO: 52 - RNA, 21 nt, synthetic construct
  misc_feature 1..21: note = Synthetic: WV-38278
  misc_feature 1..21: note = Synthetic: SSR-0103696
  modified_base 1: mod_base = OTHER; note = 2-fluororibose uracil
  modified_base 1..2: mod_base = OTHER; note = phosphorothioate
  modified_base 2: mod_base = OTHER; note = 2-fluororibose uracil
  modified_base 2..3: mod_base = OTHER; note = phosphorothioate
  modified_base 3: mod_base = OTHER; note = 2-O-methylribose adenine
  modified_base 4: mod_base = OTHER; note = 2-fluororibose cytosine
  modified_base 5: mod_base = OTHER; note = 2-O-methylribose adenine
  modified_base 6: mod_base = OTHER; note = 2-fluororibose uracil
  modified_base 7: mod_base = cm
  modified_base 8: mod_base = OTHER; note = 2-fluororibose adenine
  modified_base 9: mod_base = cm
  modified_base 10: mod_base = OTHER; note = 2-fluororibose cytosine
  modified_base 11: mod_base = cm
  modified_base 12: mod_base = OTHER; note = 2-O-methylribose adenine
  modified_base 13: mod_base = cm
  modified_base 14: mod_base = OTHER; note = 2-fluororibose uracil
  modified_base 15: mod_base = um
  modified_base 16: mod_base = OTHER; note = 2-fluororibose cytosine
  modified_base 17: mod_base = um
  modified_base 18: mod_base = OTHER; note = 2-fluororibose uracil
  modified_base 19: mod_base = um
  modified_base 19..20: mod_base = OTHER; note = phosphorothioate
  modified_base 20: mod_base = um
  modified_base 20..21: mod_base = OTHER; note = phosphorothioate
  modified_base 21: mod_base = um
  source 1..21: mol_type = other RNA
ttacatcacccacttcttttt

SEQ ID NO: 53 - RNA, 21 nt, synthetic construct
  misc_feature 1..21: note = Synthetic: WV-38279
  misc_feature 1..21: note = Synthetic: SSR-0103689
  modified_base 1: mod_base = OTHER; note = 2-fluororibose uracil
  modified_base 1..2: mod_base = OTHER; note = phosphorothioate
  modified_base 2: mod_base = OTHER; note = 2-fluororibose guanine
  modified_base 2..3: mod_base = OTHER; note = phosphorothioate
  modified_base 3: mod_base = um
  modified_base 4: mod_base = OTHER; note = 2-fluororibose uracil
  modified_base 5: mod_base = OTHER; note = 2-O-methylribose adenine
  modified_base 6: mod_base = OTHER; note = 2-fluororibose cytosine
  modified_base 7: mod_base = OTHER; note = 2-O-methylribose adenine
  modified_base 8: mod_base = OTHER; note = 2-fluororibose uracil
  modified_base 9: mod_base = cm
  modified_base 10: mod_base = OTHER; note = 2-fluororibose adenine
  modified_base 11: mod_base = cm
  modified_base 12: mod_base = cm
  modified_base 13: mod_base = cm
  modified_base 14: mod_base = OTHER; note = 2-fluororibose adenine
  modified_base 15: mod_base = cm
  modified_base 16: mod_base = OTHER; note = 2-fluororibose uracil
  modified_base 17: mod_base = um
  modified_base 18: mod_base = OTHER; note = 2-fluororibose cytosine
  modified_base 19: mod_base = um
  modified_base 19..20: mod_base = OTHER; note = phosphorothioate
  modified_base 20: mod_base = um
  modified_base 20..21: mod_base = OTHER; note = phosphorothioate
  modified_base 21: mod_base = um
  source 1..21: mol_type = other RNA
tgttacatcacccacttcttt

SEQ ID NO: 54 - RNA, 21 nt, synthetic construct
  misc_feature 1..21: note = Synthetic: WV-38280
  misc_feature 1..21: note = Synthetic: SSR-0103736
  modified_base 1: mod_base = OTHER; note = 2-fluororibose uracil
  modified_base 1..2: mod_base = OTHER; note = phosphorothioate
  modified_base 2: mod_base = OTHER; note = 2-fluororibose uracil
  modified_base 2..3: mod_base = OTHER; note = phosphorothioate
  modified_base 3: mod_base = gm
  modified_base 4: mod_base = OTHER; note = 2-fluororibose uracil
  modified_base 5: mod_base = um
  modified_base 6: mod_base = OTHER; note = 2-fluororibose adenine
  modified_base 7: mod_base = cm
  modified_base 8: mod_base = OTHER; note = 2-fluororibose adenine
  modified_base 9: mod_base = um
  modified_base 10: mod_base = OTHER; note = 2-fluororibose cytosine
  modified_base 11: mod_base = OTHER; note = 2-O-methylribose adenine
  modified_base 12: mod_base = cm
  modified_base 13: mod_base = cm
  modified_base 14: mod_base = OTHER; note = 2-fluororibose cytosine
  modified_base 15: mod_base = OTHER; note = 2-O-methylribose adenine
  modified_base 16: mod_base = OTHER; note = 2-fluororibose cytosine
  modified_base 17: mod_base = um
  modified_base 18: mod_base = OTHER; note = 2-fluororibose uracil
  modified_base 19: mod_base = cm
  modified_base 19..20: mod_base = OTHER; note = phosphorothioate
  modified_base 20: mod_base = um
  modified_base 20..21: mod_base = OTHER; note = phosphorothioate
  modified_base 21: mod_base = um
  source 1..21: mol_type = other RNA
ttgttacatcacccacttctt

SEQ ID NO: 55 - RNA, 21 nt, synthetic construct
  misc_feature 1..21: note = Synthetic: WV-38281
  misc_feature 1..21: note = Synthetic: SSR-0103756
  modified_base 1: mod_base = OTHER; note = 2-fluororibose uracil
  modified_base 1..2: mod_base = OTHER; note = phosphorothioate
  modified_base 2: mod_base = OTHER; note = 2-fluororibose uracil
  modified_base 2..3: mod_base = OTHER; note = phosphorothioate
  modified_base 3: mod_base = um
  modified_base 4: mod_base = OTHER; note = 2-fluororibose guanine
  modified_base 5: mod_base = um
  modified_base 6: mod_base = OTHER; note = 2-fluororibose uracil
  modified_base 7: mod_base = OTHER; note = 2-O-methylribose adenine
  modified_base 8: mod_base = OTHER; note = 2-fluororibose cytosine
  modified_base 9: mod_base = OTHER; note = 2-O-methylribose adenine
  modified_base 10: mod_base = OTHER; note = 2-fluororibose uracil
  modified_base 11: mod_base = cm
  modified_base 12: mod_base = OTHER; note = 2-O-methylribose adenine
  modified_base 13: mod_base = cm
  modified_base 14: mod_base = OTHER; note = 2-fluororibose cytosine
  modified_base 15: mod_base = cm
  modified_base 16: mod_base = OTHER; note = 2-fluororibose adenine
  modified_base 17: mod_base = cm
  modified_base 18: mod_base = OTHER; note = 2-fluororibose uracil
  modified_base 19: mod_base = um
  modified_base 19..20: mod_base = OTHER; note = phosphorothioate
  modified_base 20: mod_base = um
  modified_base 20..21: mod_base = OTHER; note = phosphorothioate
  modified_base 21: mod_base = um
  source 1..21: mol_type = other RNA
tttgttacatcacccactttt

SEQ ID NO: 56 - RNA, 21 nt, synthetic construct
  misc_feature 1..21: note = Synthetic: WV-38282
  misc_feature 1..21: note = Synthetic: SSR-0103629
  modified_base 1: mod_base = OTHER; note = 2-fluororibose uracil
  modified_base 1..2: mod_base = OTHER; note = phosphorothioate
  modified_base 2: mod_base = OTHER; note = 2-fluororibose cytosine
  modified_base 2..3: mod_base = OTHER; note = phosphorothioate
  modified_base 3: mod_base = OTHER; note = 2-O-methylribose adenine
  modified_base 4: mod_base = OTHER; note = 2-fluororibose cytosine
  modified_base 5: mod_base = cm
  modified_base 6: mod_base = OTHER; note = 2-fluororibose adenine
  modified_base 7: mod_base = cm
  modified_base 8: mod_base = OTHER; note = 2-fluororibose guanine
  modified_base 9: mod_base = OTHER; note = 2-O-methylribose adenine
  modified_base 10: mod_base = OTHER; note = 2-fluororibose uracil
  modified_base 11: mod_base = um
  modified_base 12: mod_base = gm
  modified_base 13: mod_base = um
  modified_base 14: mod_base = OTHER; note = 2-fluororibose uracil
  modified_base 15: mod_base = OTHER; note = 2-O-methylribose adenine
  modified_base 16: mod_base = OTHER; note = 2-fluororibose cytosine
  modified_base 17: mod_base = OTHER; note = 2-O-methylribose adenine
  modified_base 18: mod_base = OTHER; note = 2-fluororibose uracil
  modified_base 19: mod_base = cm
  modified_base 19..20: mod_base = OTHER; note = phosphorothioate
  modified_base 20: mod_base = um
  modified_base 20..21: mod_base = OTHER; note = phosphorothioate
  modified_base 21: mod_base = um
  source 1..21: mol_type = other RNA
tcaccacgattgttacatctt

SEQ ID NO: 57 - RNA, 21 nt, synthetic construct
  misc_feature 1..21: note = Synthetic: WV-38283
  misc_feature 1..21: note = Synthetic: SSR-0103624
  modified_base 1: mod_base = OTHER; note = 2-fluororibose uracil
  modified_base 1..2: mod_base = OTHER; note = phosphorothioate
  modified_base 2: mod_base = OTHER; note = 2-fluororibose adenine
  modified_base 2..3: mod_base = OTHER; note = phosphorothioate
  modified_base 3: mod_base = um
  modified_base 4: mod_base = OTHER; note = 2-fluororibose uracil
  modified_base 5: mod_base = cm
  modified_base 6: mod_base = OTHER; note = 2-fluororibose adenine
  modified_base 7: mod_base = cm
  modified_base 8: mod_base = OTHER; note = 2-fluororibose cytosine
  modified_base 9: mod_base = OTHER; note = 2-O-methylribose adenine
  modified_base 10: mod_base = OTHER; note = 2-fluororibose cytosine
  modified_base 11: mod_base = gm
  modified_base 12: mod_base = OTHER; note = 2-O-methylribose adenine
  modified_base 13: mod_base = um
  modified_base 14: mod_base = OTHER; note = 2-fluororibose uracil
  modified_base 15: mod_base = gm
  modified_base 16: mod_base = OTHER; note = 2-fluororibose uracil
  modified_base 17: mod_base = um
  modified_base 18: mod_base = OTHER; note = 2-fluororibose adenine
  modified_base 19: mod_base = cm
  modified_base 19..20: mod_base = OTHER; note = phosphorothioate
  modified_base 20: mod_base = um
  modified_base 20..21: mod_base = OTHER; note = phosphorothioate
  modified_base 21: mod_base = um
  source 1..21: mol_type = other RNA
tattcaccacgattgttactt

SEQ ID NO: 58 - RNA, 21 nt, synthetic construct
  misc_feature 1..21: note = Synthetic: WV-38284
  misc_feature 1..21: note = Synthetic: SSR-0103703
  modified_base 1: mod_base = OTHER; note = 2-fluororibose uracil
  modified_base 1..2: mod_base = OTHER; note = phosphorothioate
  modified_base 2: mod_base = OTHER; note = 2-fluororibose uracil
  modified_base 2..3: mod_base = OTHER; note = phosphorothioate
  modified_base 3: mod_base = OTHER; note = 2-O-methylribose adenine
  modified_base 4: mod_base = OTHER; note = 2-fluororibose uracil
  modified_base 5: mod_base = um
  modified_base 6: mod_base = OTHER; note = 2-fluororibose cytosine
  modified_base 7: mod_base = OTHER; note = 2-O-methylribose adenine
  modified_base 8: mod_base = OTHER; note = 2-fluororibose cytosine
  modified_base 9: mod_base = cm
  modified_base 10: mod_base = OTHER; note = 2-fluororibose adenine
  modified_base 11: mod_base = cm
  modified_base 12: mod_base = gm
  modified_base 13: mod_base = OTHER; note = 2-O-methylribose adenine
  modified_base 14: mod_base = OTHER; note = 2-fluororibose uracil
  modified_base 15: mod_base = um
  modified_base 16: mod_base = OTHER; note = 2-fluororibose guanine
  modified_base 17: mod_base = um
  modified_base 18: mod_base = OTHER; note = 2-fluororibose uracil
  modified_base 19: mod_base = OTHER; note = 2-O-methylribose adenine
  modified_base 19..20: mod_base = OTHER; note = phosphorothioate
  modified_base 20: mod_base = um
  modified_base 20..21: mod_base = OTHER; note = phosphorothioate
  modified_base 21: mod_base = um
  source 1..21: mol_type = other RNA
ttattcaccacgattgttatt

SEQ ID NO: 59 - RNA, 21 nt, synthetic construct
  misc_feature 1..21: note = Synthetic: WV-38285
  misc_feature 1..21: note = Synthetic: SSR-0103684
  modified_base 1: mod_base = OTHER; note = 2-fluororibose uracil
  modified_base 1..2: mod_base = OTHER; note = phosphorothioate
  modified_base 2: mod_base = OTHER; note = 2-fluororibose guanine
  modified_base 2..3: mod_base = OTHER; note = phosphorothioate
  modified_base 3: mod_base = um
  modified_base 4: mod_base = OTHER; note = 2-fluororibose cytosine
  modified_base 5: mod_base = cm
  modified_base 6: mod_base = OTHER; note = 2-fluororibose cytosine
  modified_base 7: mod_base = OTHER; note = 2-O-methylribose adenine
  modified_base 8: mod_base = OTHER; note = 2-fluororibose guanine
  modified_base 9: mod_base = cm
  modified_base 10: mod_base = OTHER; note = 2-fluororibose adenine
  modified_base 11: mod_base = um
  modified_base 12: mod_base = um
  modified_base 13: mod_base = OTHER; note = 2-O-methylribose adenine
  modified_base 14: mod_base = OTHER; note = 2-fluororibose uracil
  modified_base 15: mod_base = um
  modified_base 16: mod_base = OTHER; note = 2-fluororibose cytosine
  modified_base 17: mod_base = OTHER; note = 2-O-methylribose adenine
  modified_base 18: mod_base = OTHER; note = 2-fluororibose cytosine
  modified_base 19: mod_base = cm
  modified_base 19..20: mod_base = OTHER; note = phosphorothioate
  modified_base 20: mod_base = um
  modified_base 20..21: mod_base = OTHER; note = phosphorothioate
  modified_base 21: mod_base = um
  source 1..21: mol_type = other RNA
tgtcccagcattattcacctt

SEQ ID NO: 60 - RNA, 21 nt, synthetic construct
  misc_feature 1..21: note = Synthetic: WV-38286
  misc_feature 1..21: note = Synthetic: SSR-0103593
  modified_base 1: mod_base = OTHER; note = 2-fluororibose uracil
  modified_base 1..2: mod_base = OTHER; note = phosphorothioate
  modified_base 2: mod_base = OTHER; note = 2-fluororibose adenine
  modified_base 2..3: mod_base = OTHER; note = phosphorothioate
  modified_base 3: mod_base = cm
  modified_base 4: mod_base = OTHER; note = 2-fluororibose uracil
  modified_base 5: mod_base = gm
  modified_base 6: mod_base = OTHER; note = 2-fluororibose uracil
  modified_base 7: mod_base = cm
  modified_base 8: mod_base = OTHER; note = 2-fluororibose cytosine
  modified_base 9: mod_base = cm
  modified_base 10: mod_base = OTHER; note = 2-fluororibose adenine
  modified_base 11: mod_base = gm
  modified_base 12: mod_base = cm
  modified_base 13: mod_base = OTHER; note = 2-O-methylribose adenine
  modified_base 14: mod_base = OTHER; note = 2-fluororibose uracil
  modified_base 15: mod_base = um
  modified_base 16: mod_base = OTHER; note = 2-fluororibose adenine
  modified_base 17: mod_base = um
  modified_base 18: mod_base = OTHER; note = 2-fluororibose uracil
  modified_base 19: mod_base = cm
  modified_base 19..20: mod_base = OTHER; note = phosphorothioate
  modified_base 20: mod_base = um
  modified_base 20..21: mod_base = OTHER; note = phosphorothioate
  modified_base 21: mod_base = um
  source 1..21: mol_type = other RNA
tactgtcccagcattattctt

SEQ ID NO: 61 - RNA, 21 nt, synthetic construct
  misc_feature 1..21: note = Synthetic: WV-38287
  misc_feature 1..21: note = Synthetic: SSR-0103698
  modified_base 1: mod_base = OTHER; note = 2-fluororibose uracil
  modified_base 1..2: mod_base = OTHER; note = phosphorothioate
  modified_base 2: mod_base = OTHER; note = 2-fluororibose uracil
  modified_base 2..3: mod_base = OTHER; note = phosphorothioate
  modified_base 3: mod_base = OTHER; note = 2-O-methylribose adenine
  modified_base 4: mod_base = OTHER; note = 2-fluororibose cytosine
  modified_base 5: mod_base = um
  modified_base 6: mod_base = OTHER; note = 2-fluororibose guanine
  modified_base 7: mod_base = um
  modified_base 8: mod_base = OTHER; note = 2-fluororibose cytosine
  modified_base 9: mod_base = cm
  modified_base 10: mod_base = OTHER; note = 2-fluororibose cytosine
  modified_base 11: mod_base = OTHER; note = 2-O-methylribose adenine
  modified_base 12: mod_base = gm
  modified_base 13: mod_base = cm
  modified_base 14: mod_base = OTHER; note = 2-fluororibose adenine
  modified_base 15: mod_base = um
  modified_base 16: mod_base = OTHER; note = 2-fluororibose uracil
  modified_base 17: mod_base = OTHER; note = 2-O-methylribose adenine
  modified_base 18: mod_base = OTHER; note = 2-fluororibose uracil
  modified_base 19: mod_base = um
  modified_base 19..20: mod_base = OTHER; note = phosphorothioate
  modified_base 20: mod_base = um
  modified_base 20..21: mod_base = OTHER; note = phosphorothioate
  modified_base 21: mod_base = um
  source 1..21: mol_type = other RNA
ttactgtcccagcattatttt

SEQ ID NO: 62 - RNA, 21 nt, synthetic construct
  misc_feature 1..21: note = Synthetic: WV-38288
  misc_feature 1..21: note = Synthetic: SSR-0103614
  modified_base 1: mod_base = OTHER; note = 2-fluororibose uracil
  modified_base 1..2: mod_base = OTHER; note = phosphorothioate
  modified_base 2: mod_base = OTHER; note = 2-fluororibose adenine
  modified_base 2..3: mod_base = OTHER; note = phosphorothioate
  modified_base 3: mod_base = um
  modified_base 4: mod_base = OTHER; note = 2-fluororibose adenine
  modified_base 5: mod_base = cm
  modified_base 6: mod_base = OTHER; note = 2-fluororibose uracil
  modified_base 7: mod_base = gm
  modified_base 8: mod_base = OTHER; note = 2-fluororibose uracil
  modified_base 9: mod_base = cm
  modified_base 10: mod_base = OTHER; note = 2-fluororibose cytosine
  modified_base 11: mod_base = cm
  modified_base 12: mod_base = OTHER; note = 2-O-methylribose adenine
  modified_base 13: mod_base = gm
  modified_base 14: mod_base = OTHER; note = 2-fluororibose cytosine
  modified_base 15: mod_base = OTHER; note = 2-O-methylribose adenine
  modified_base 16: mod_base = OTHER; note = 2-fluororibose uracil
  modified_base 17: mod_base = um
  modified_base 18: mod_base = OTHER; note = 2-fluororibose adenine
  modified_base 19: mod_base = um
  modified_base 19..20: mod_base = OTHER; note = phosphorothioate
  modified_base 20: mod_base = um
  modified_base 20..21: mod_base = OTHER; note = phosphorothioate
  modified_base 21: mod_base = um
  source 1..21: mol_type = other RNA
tatactgtcccagcattattt

SEQ ID NO: 63 - RNA, 21 nt, synthetic construct
  misc_feature 1..21: note = Synthetic: WV-38289
  misc_feature 1..21: note = Synthetic: SSR-0103645
  modified_base 1: mod_base = OTHER; note = 2-fluororibose uracil
  modified_base 1..2: mod_base = OTHER; note = phosphorothioate
  modified_base 2: mod_base = OTHER; note = 2-fluororibose cytosine
  modified_base 2..3: mod_base = OTHER; note = phosphorothioate
  modified_base 3: mod_base = gm
  modified_base 4: mod_base = OTHER; note = 2-fluororibose guanine
  modified_base 5: mod_base = cm
  modified_base 6: mod_base = OTHER; note = 2-fluororibose uracil
  modified_base 7: mod_base = gm
  modified_base 8: mod_base = OTHER; note = 2-fluororibose guanine
  modified_base 9: mod_base = OTHER; note = 2-O-methylribose adenine
  modified_base 10: mod_base = OTHER; note = 2-fluororibose uracil
  modified_base 11: mod_base = OTHER; note = 2-O-methylribose adenine
  modified_base 12: mod_base = um
  modified_base 13: mod_base = OTHER; note = 2-O-methylribose adenine
  modified_base 14: mod_base = OTHER; note = 2-fluororibose cytosine
  modified_base 15: mod_base = um
  modified_base 16: mod_base = OTHER; note = 2-fluororibose guanine
  modified_base 17: mod_base = um
  modified_base 18: mod_base = OTHER; note = 2-fluororibose cytosine
  modified_base 19: mod_base = cm
  modified_base 19..20: mod_base = OTHER; note = phosphorothioate
  modified_base 20: mod_base = um
  modified_base 20..21: mod_base = OTHER; note = phosphorothioate
  modified_base 21: mod_base = um
  source 1..21: mol_type = other RNA
tcggctggatatactgtcctt

SEQ ID NO: 64 - RNA, 21 nt, synthetic construct
  misc_feature 1..21: note = Synthetic: WV-38290
  misc_feature 1..21: note = Synthetic: SSR-0103712
  modified_base 1: mod_base = OTHER; note = 2-fluororibose uracil
  modified_base 1..2: mod_base = OTHER; note = phosphorothioate
  modified_base 2: mod_base = OTHER; note = 2-fluororibose uracil
  modified_base 2..3: mod_base = OTHER; note = phosphorothioate
  modified_base 3: mod_base = cm
  modified_base 4: mod_base = OTHER; note = 2-fluororibose guanine
  modified_base 5: mod_base = gm
  modified_base 6: mod_base = OTHER; note = 2-fluororibose cytosine
  modified_base 7: mod_base = um
  modified_base 8: mod_base = OTHER; note = 2-fluororibose guanine
  modified_base 9: mod_base = gm
  modified_base 10: mod_base = OTHER; note = 2-fluororibose adenine
  modified_base 11: mod_base = um
  modified_base 12: mod_base = OTHER; note = 2-O-methylribose adenine
  modified_base 13: mod_base = um
  modified_base 14: mod_base = OTHER; note = 2-fluororibose adenine
  modified_base 15: mod_base = cm
  modified_base 16: mod_base = OTHER; note = 2-fluororibose uracil
  modified_base 17: mod_base = gm
  modified_base 18: mod_base = OTHER; note = 2-fluororibose uracil
  modified_base 19: mod_base = cm
  modified_base 19..20: mod_base = OTHER; note = phosphorothioate
  modified_base 20: mod_base = um
  modified_base 20..21: mod_base = OTHER; note = phosphorothioate
  modified_base 21: mod_base = um
  source 1..21: mol_type = other RNA
ttcggctggatatactgtctt

SEQ ID NO: 65 - RNA, 21 nt, synthetic construct
  misc_feature 1..21: note = Synthetic: WV-38291
  misc_feature 1..21: note = Synthetic: SSR-0103671
  modified_base 1: mod_base = OTHER; note = 2-fluororibose uracil
  modified_base 1..2: mod_base = OTHER; note = phosphorothioate
  modified_base 2: mod_base = OTHER; note = 2-fluororibose guanine
  modified_base 2..3: mod_base = OTHER; note = phosphorothioate
  modified_base 3: mod_base = OTHER; note = 2-O-methylribose adenine
  modified_base 4: mod_base = OTHER; note = 2-fluororibose uracil
  modified_base 5: mod_base = cm
  modified_base 6: mod_base = OTHER; note = 2-fluororibose guanine
  modified_base 7: mod_base = gm
  modified_base 8: mod_base = OTHER; note = 2-fluororibose cytosine
  modified_base 9: mod_base = um
  modified_base 10: mod_base = OTHER; note = 2-fluororibose guanine
  modified_base 11: mod_base = gm
  modified_base 12: mod_base = OTHER; note = 2-O-methylribose adenine
  modified_base 13: mod_base = um
  modified_base 14: mod_base = OTHER; note = 2-fluororibose adenine
  modified_base 15: mod_base = um
  modified_base 16: mod_base = OTHER; note = 2-fluororibose adenine
  modified_base 17: mod_base = cm
  modified_base 18: mod_base = OTHER; note = 2-fluororibose uracil
  modified_base 19: mod_base = gm
  modified_base 19..20: mod_base = OTHER; note = phosphorothioate
  modified_base 20: mod_base = um
  modified_base 20..21: mod_base = OTHER; note = phosphorothioate
  modified_base 21: mod_base = um
  source 1..21: mol_type = other RNA
tgatcggctggatatactgtt

SEQ ID NO: 66 - RNA, 21 nt, synthetic construct
  misc_feature 1..21: note = Synthetic: WV-38292
  misc_feature 1..21: note = Synthetic: SSR-0103597
  modified_base 1: mod_base = OTHER; note = 2-fluororibose uracil
  modified_base 1..2: mod_base = OTHER; note = phosphorothioate
  modified_base 2: mod_base = OTHER; note = 2-fluororibose adenine
  modified_base 2..3: mod_base = OTHER; note = phosphorothioate
  modified_base 3: mod_base = gm
  modified_base 4: mod_base = OTHER; note = 2-fluororibose adenine
  modified_base 5: mod_base = um
  modified_base 6: mod_base = OTHER; note = 2-fluororibose cytosine
  modified_base 7: mod_base = gm
  modified_base 8: mod_base = OTHER; note = 2-fluororibose guanine
  modified_base 9: mod_base = cm
  modified_base 10: mod_base = OTHER; note = 2-fluororibose uracil
  modified_base 11: mod_base = gm
  modified_base 12: mod_base = gm
  modified_base 13: mod_base = OTHER; note = 2-O-methylribose adenine
  modified_base 14: mod_base = OTHER; note = 2-fluororibose uracil
  modified_base 15: mod_base = OTHER; note = 2-O-methylribose adenine
  modified_base 16: mod_base = OTHER; note = 2-fluororibose uracil
  modified_base 17: mod_base = OTHER; note = 2-O-methylribose adenine
  modified_base 18: mod_base = OTHER; note = 2-fluororibose cytosine
  modified_base 19: mod_base = um
  modified_base 19..20: mod_base = OTHER; note = phosphorothioate
  modified_base 20: mod_base = um
  modified_base 20..21: mod_base = OTHER; note = phosphorothioate
  modified_base 21: mod_base = um
  source 1..21: mol_type = other RNA
tagatcggctggatatacttt

SEQ ID NO: 67 - RNA, 21 nt, synthetic construct
  misc_feature 1..21: note = Synthetic: WV-38293
  misc_feature 1..21: note = Synthetic: SSR-0103715
  modified_base 1: mod_base = OTHER; note = 2-fluororibose uracil
  modified_base 1..2: mod_base = OTHER; note = phosphorothioate
  modified_base 2: mod_base = OTHER; note = 2-fluororibose uracil
  modified_base 2..3: mod_base = OTHER; note = phosphorothioate
  modified_base 3: mod_base = cm
  modified_base 4: mod_base = OTHER; note = 2-fluororibose uracil
  modified_base 5: mod_base = cm
  modified_base 6: mod_base = OTHER; note = 2-fluororibose uracil
  modified_base 7: mod_base = um
  modified_base 8: mod_base = OTHER; note = 2-fluororibose cytosine
  modified_base 9: mod_base = OTHER; note = 2-O-methylribose adenine
  modified_base 10: mod_base = OTHER; note = 2-fluororibose uracil
  modified_base 11: mod_base = cm
  modified_base 12: mod_base = cm
  modified_base 13: mod_base = um
  modified_base 14: mod_base = OTHER; note = 2-fluororibose uracil
  modified_base 15: mod_base = gm
  modified_base 16: mod_base = OTHER; note = 2-fluororibose guanine
  modified_base 17: mod_base = um
  modified_base 18: mod_base = OTHER; note = 2-fluororibose guanine
  modified_base 19: mod_base = cm
  modified_base 19..20: mod_base = OTHER; note = phosphorothioate
  modified_base 20: mod_base = um
  modified_base 20..21: mod_base = OTHER; note = phosphorothioate
  modified_base 21: mod_base = um
  source 1..21: mol_type = other RNA
ttctcttcatccttggtgctt

SEQ ID NO: 68 - RNA, 21 nt, synthetic construct
  misc_feature 1..21: note = Synthetic: WV-38294
  misc_feature 1..21: note = Synthetic: SSR-0103619
  modified_base 1: mod_base = OTHER; note = 2-fluororibose uracil
  modified_base 1..2: mod_base = OTHER; note = phosphorothioate
  modified_base 2: mod_base = OTHER; note = 2-fluororibose adenine
  modified_base 2..3: mod_base = OTHER; note = phosphorothioate
  modified_base 3: mod_base = um
  modified_base 4: mod_base = OTHER; note = 2-fluororibose cytosine
  modified_base 5: mod_base = um
  modified_base 6: mod_base = OTHER; note = 2-fluororibose cytosine
  modified_base 7: mod_base = um
  modified_base 8: mod_base = OTHER; note = 2-fluororibose uracil
  modified_base 9: mod_base = cm
  modified_base 10: mod_base = OTHER; note = 2-fluororibose adenine
  modified_base 11: mod_base = um
  modified_base 12: mod_base = cm
  modified_base 13: mod_base = cm
  modified_base 14: mod_base = OTHER; note = 2-fluororibose uracil
  modified_base 15: mod_base = um
  modified_base 16: mod_base = OTHER; note = 2-fluororibose guanine
  modified_base 17: mod_base = gm
  modified_base 18: mod_base = OTHER; note = 2-fluororibose uracil
  modified_base 19: mod_base = gm
  modified_base 19..20: mod_base = OTHER; note = phosphorothioate
  modified_base 20: mod_base = um
  modified_base 20..21: mod_base = OTHER; note = phosphorothioate
  modified_base 21: mod_base = um
  source 1..21: mol_type = other RNA
tatctcttcatccttggtgtt

SEQ ID NO: 69 - RNA, 21 nt, synthetic construct
  misc_feature 1..21: note = Synthetic: WV-38295
  misc_feature 1..21: note = Synthetic: SSR-0103583
  modified_base 1: mod_base = OTHER; note = 2-fluororibose uracil
  modified_base 1..2: mod_base = OTHER; note = phosphorothioate
  modified_base 2: mod_base = OTHER; note = 2-fluororibose adenine
  modified_base 2..3: mod_base = OTHER; note = phosphorothioate
  modified_base 3: mod_base = OTHER; note = 2-O-methylribose adenine
  modified_base 4: mod_base = OTHER; note = 2-fluororibose uracil
  modified_base 5: mod_base = cm
  modified_base 6: mod_base = OTHER; note = 2-fluororibose uracil
  modified_base 7: mod_base = cm
  modified_base 8: mod_base = OTHER; note = 2-fluororibose uracil
  modified_base 9: mod_base = um
  modified_base 10: mod_base = OTHER; note = 2-fluororibose cytosine
  modified_base 11: mod_base = OTHER; note = 2-O-methylribose adenine
  modified_base 12: mod_base = um
  modified_base 13: mod_base = cm
  modified_base 14: mod_base = OTHER; note = 2-fluororibose cytosine
  modified_base 15: mod_base = um
  modified_base 16: mod_base = OTHER; note = 2-fluororibose uracil
  modified_base 17: mod_base = gm
  modified_base 18: mod_base = OTHER; note = 2-fluororibose guanine
  modified_base 19: mod_base = um
  modified_base 19..20: mod_base = OTHER; note = phosphorothioate
  modified_base 20: mod_base = um
  modified_base 20..21: mod_base = OTHER; note = phosphorothioate
  modified_base 21: mod_base = um
  source 1..21: mol_type = other RNA
taatctcttcatccttggttt

SEQ ID NO: 70 - RNA, 21 nt, synthetic construct
  misc_feature 1..21: note = Synthetic: WV-38296
  misc_feature 1..21: note = Synthetic: SSR-0103680
  modified_base 1: mod_base = OTHER; note = 2-fluororibose uracil
  modified_base 1..2: mod_base = OTHER; note = phosphorothioate
  modified_base 2: mod_base = OTHER; note = 2-fluororibose guanine
  modified_base 2..3: mod_base = OTHER; note = phosphorothioate
  modified_base 3: mod_base = gm
  modified_base 4: mod_base = OTHER; note = 2-fluororibose uracil
  modified_base 5: mod_base = OTHER; note = 2-O-methylribose adenine
  modified_base 6: mod_base = OTHER; note = 2-fluororibose adenine
  modified_base 7: mod_base = um
  modified_base 8: mod_base = OTHER; note = 2-fluororibose cytosine
  modified_base 9: mod_base = um
  modified_base 10: mod_base = OTHER; note = 2-fluororibose cytosine
  modified_base 11: mod_base = um
  modified_base 12: mod_base = um
  modified_base 13: mod_base = cm
  modified_base 14: mod_base = OTHER; note = 2-fluororibose adenine
  modified_base 15: mod_base = um
  modified_base 16: mod_base = OTHER; note = 2-fluororibose cytosine
  modified_base 17: mod_base = cm
  modified_base 18: mod_base = OTHER; note = 2-fluororibose uracil
  modified_base 19: mod_base = um
  modified_base 19..20: mod_base = OTHER; note = phosphorothioate
  modified_base 20: mod_base = um
  modified_base 20..21: mod_base = OTHER; note = phosphorothioate
  modified_base 21: mod_base = um
  source 1..21: mol_type = other RNA
tggtaatctcttcatcctttt

SEQ ID NO: 71 - RNA, 21 nt, synthetic construct
  misc_feature 1..21: note = Synthetic: WV-38297
  misc_feature 1..21: note = Synthetic: SSR-0103733
  modified_base 1: mod_base = OTHER; note = 2-fluororibose uracil
  modified_base 1..2: mod_base = OTHER; note = phosphorothioate
  modified_base 2: mod_base = OTHER; note = 2-fluororibose uracil
  modified_base 2..3: mod_base = OTHER; note = phosphorothioate
  modified_base 3: mod_base = gm
  modified_base 4: mod_base = OTHER; note = 2-fluororibose guanine
  modified_base 5: mod_base = um
  modified_base 6: mod_base = OTHER; note = 2-fluororibose adenine
  modified_base 7: mod_base = OTHER; note = 2-O-methylribose adenine
  modified_base 8: mod_base = OTHER; note = 2-fluororibose uracil
  modified_base 9: mod_base = cm
  modified_base 10: mod_base = OTHER; note = 2-fluororibose uracil
  modified_base 11: mod_base = cm
  modified_base 12: mod_base = um
  modified_base 13: mod_base = um
  modified_base 14: mod_base = OTHER; note = 2-fluororibose cytosine
  modified_base 15: mod_base = OTHER; note = 2-O-methylribose adenine
  modified_base 16: mod_base = OTHER; note = 2-fluororibose uracil
  modified_base 17: mod_base = cm
  modified_base 18: mod_base = OTHER; note = 2-fluororibose cytosine
  modified_base 19: mod_base = um
  modified_base 19..20: mod_base = OTHER; note = phosphorothioate
  modified_base 20: mod_base = um
  modified_base 20..21: mod_base = OTHER; note = phosphorothioate
  modified_base 21: mod_base = um
  source 1..21: mol_type = other RNA
ttggtaatctcttcatccttt

SEQ ID NO: 72 - RNA, 21 nt, synthetic construct
  misc_feature 1..21: note = Synthetic: WV-38298
  misc_feature 1..21: note = Synthetic: SSR-0103678
  modified_base 1: mod_base = OTHER; note = 2-fluororibose uracil
  modified_base 1..2: mod_base = OTHER; note = phosphorothioate
  modified_base 2: mod_base = OTHER; note = 2-fluororibose guanine
  modified_base 2..3: mod_base = OTHER; note = phosphorothioate
  modified_base 3: mod_base = gm
  modified_base 4: mod_base = OTHER; note = 2-fluororibose adenine
  modified_base 5: mod_base = um
  modified_base 6: mod_base = OTHER; note = 2-fluororibose guanine
  modified_base 7: mod_base = um
  modified_base 8: mod_base = OTHER; note = 2-fluororibose uracil
  modified_base 9: mod_base = gm
  modified_base 10: mod_base = OTHER; note = 2-fluororibose adenine
  modified_base 11: mod_base = cm
  modified_base 12: mod_base = cm
  modified_base 13: mod_base = um
  modified_base 14: mod_base = OTHER; note = 2-fluororibose cytosine
  modified_base 15: mod_base = OTHER; note = 2-O-methylribose adenine
  modified_base 16: mod_base = OTHER; note = 2-fluororibose adenine
  modified_base 17: mod_base = OTHER; note = 2-O-methylribose adenine
  modified_base 18: mod_base = OTHER; note = 2-fluororibose uracil
  modified_base 19: mod_base = gm
  modified_base 19..20: mod_base = OTHER; note = phosphorothioate
  modified_base 20: mod_base = um
  modified_base 20..21: mod_base = OTHER; note = phosphorothioate
  modified_base 21: mod_base = um
  source 1..21: mol_type = other RNA
tggatgttgacctcaaatgtt

SEQ ID NO: 73 - RNA, 21 nt, synthetic construct
  misc_feature 1..21: note = Synthetic: WV-38299
  misc_feature 1..21: note = Synthetic: SSR-0103605
  modified_base 1: mod_base = OTHER; note = 2-fluororibose uracil
  modified_base 1..2: mod_base = OTHER; note = phosphorothioate
  modified_base 2: mod_base = OTHER; note = 2-fluororibose adenine
  modified_base 2..3: mod_base = OTHER; note = phosphorothioate
  modified_base 3: mod_base = gm
  modified_base 4: mod_base = OTHER; note = 2-fluororibose guanine
  modified_base 5: mod_base = OTHER; note = 2-O-methylribose adenine
  modified_base 6: mod_base = OTHER; note = 2-fluororibose uracil
  modified_base 7: mod_base = gm
  modified_base 8: mod_base = OTHER; note = 2-fluororibose uracil
  modified_base 9: mod_base = um
  modified_base 10: mod_base = OTHER; note = 2-fluororibose guanine
  modified_base 11: mod_base = OTHER; note = 2-O-methylribose adenine
  modified_base 12: mod_base = cm
  modified_base 13: mod_base = cm
  modified_base 14: mod_base = OTHER; note = 2-fluororibose uracil
  modified_base 15: mod_base = cm
  modified_base 16: mod_base = OTHER; note = 2-fluororibose adenine
  modified_base 17: mod_base = OTHER; note = 2-O-methylribose adenine
  modified_base 18: mod_base = OTHER; note = 2-fluororibose adenine
  modified_base 19: mod_base = um
  modified_base 19..20: mod_base = OTHER; note = phosphorothioate
  modified_base 20: mod_base = um
  modified_base 20..21: mod_base = OTHER; note = phosphorothioate
  modified_base 21: mod_base = um
  source 1..21: mol_type = other RNA
taggatgttgacctcaaattt

SEQ ID NO: 74 - RNA, 21 nt, synthetic construct
  misc_feature 1..21: note = Synthetic: WV-38300
  misc_feature 1..21: note = Synthetic: SSR-0103670
  modified_base 1: mod_base = OTHER; note = 2-fluororibose uracil
  modified_base 1..2: mod_base = OTHER; note = phosphorothioate
  modified_base 2: mod_base = OTHER; note = 2-fluororibose guanine
  modified_base 2..3: mod_base = OTHER; note = phosphorothioate
  modified_base 3: mod_base = OTHER; note = 2-O-methylribose adenine
  modified_base 4: mod_base = OTHER; note = 2-fluororibose uracil
  modified_base 5: mod_base = cm
  modified_base 6: mod_base = OTHER; note = 2-fluororibose cytosine
  modified_base 7: mod_base = OTHER; note = 2-O-methylribose adenine
  modified_base 8: mod_base = OTHER; note = 2-fluororibose adenine
  modified_base 9: mod_base = OTHER; note = 2-O-methylribose adenine
  modified_base 10: mod_base = OTHER; note = 2-fluororibose adenine
  modified_base 11: mod_base = OTHER; note = 2-O-methylribose adenine
  modified_base 12: mod_base = um
  modified_base 13: mod_base = gm
  modified_base 14: mod_base = OTHER; note = 2-fluororibose uracil
  modified_base 15: mod_base = cm
  modified_base 16: mod_base = OTHER; note = 2-fluororibose cytosine
  modified_base 17: mod_base = um
  modified_base 18: mod_base = OTHER; note = 2-fluororibose adenine
  modified_base 19: mod_base = gm
  modified_base 19..20: mod_base = OTHER; note = phosphorothioate
  modified_base 20: mod_base = um
  modified_base 20..21: mod_base = OTHER; note = phosphorothioate
  modified_base 21: mod_base = um
  source 1..21: mol_type = other RNA
tgatccaaaaatgtcctagtt

SEQ ID NO: 75 - RNA, 21 nt, synthetic construct
  misc_feature 1..21: note = Synthetic: WV-38301
  misc_feature 1..21: note = Synthetic: SSR-0103686
  modified_base 1: mod_base = OTHER; note = 2-fluororibose uracil
  modified_base 1..2: mod_base = OTHER; note = phosphorothioate
  modified_base 2: mod_base = OTHER; note = 2-fluororibose guanine
  modified_base 2..3: mod_base = OTHER; note = phosphorothioate
  modified_base 3: mod_base = um
  modified_base 4: mod_base = OTHER; note = 2-fluororibose guanine
  modified_base 5: mod_base = OTHER; note = 2-O-methylribose adenine
  modified_base 6: mod_base = OTHER; note = 2-fluororibose uracil
  modified_base 7: mod_base = cm
  modified_base 8: mod_base = OTHER; note = 2-fluororibose cytosine
  modified_base 9: mod_base = OTHER; note = 2-O-methylribose adenine
  modified_base 10: mod_base = OTHER; note = 2-fluororibose adenine
  modified_base 11: mod_base = OTHER; note = 2-O-methylribose adenine
  modified_base 12: mod_base = OTHER; note = 2-O-methylribose adenine
  modified_base 13: mod_base = OTHER; note = 2-O-methylribose adenine
  modified_base 14: mod_base = OTHER; note = 2-fluororibose uracil
  modified_base 15: mod_base = gm
  modified_base 16: mod_base = OTHER; note = 2-fluororibose uracil
  modified_base 17: mod_base = cm
  modified_base 18: mod_base = OTHER; note = 2-fluororibose cytosine
  modified_base 19: mod_base = um
  modified_base 19..20: mod_base = OTHER; note = phosphorothioate
  modified_base 20: mod_base = um
  modified_base 20..21: mod_base = OTHER; note = phosphorothioate
  modified_base 21: mod_base = um
  source 1..21: mol_type = other RNA
tgtgatccaaaaatgtccttt

SEQ ID NO: 76 - RNA, 21 nt, synthetic construct
  misc_feature 1..21: note = Synthetic: WV-38302
  misc_feature 1..21: note = Synthetic: SSR-0103735
  modified_base 1: mod_base = OTHER; note = 2-fluororibose uracil
  modified_base 1..2: mod_base = OTHER; note = phosphorothioate
  modified_base 2: mod_base = OTHER; note = 2-fluororibose uracil
  modified_base 2..3: mod_base = OTHER; note = phosphorothioate
  modified_base 3: mod_base = gm
  modified_base 4: mod_base = OTHER; note = 2-fluororibose uracil
  modified_base 5: mod_base = gm
  modified_base 6: mod_base = OTHER; note = 2-fluororibose adenine
  modified_base 7: mod_base = um
  modified_base 8: mod_base = OTHER; note = 2-fluororibose cytosine
  modified_base 9: mod_base = cm
  modified_base 10: mod_base = OTHER; note = 2-fluororibose adenine
  modified_base 11: mod_base = OTHER; note = 2-O-methylribose adenine
  modified_base 12: mod_base = OTHER; note = 2-O-methylribose adenine
  modified_base 13: mod_base = OTHER; note = 2-O-methylribose adenine
  modified_base 14: mod_base = OTHER; note = 2-fluororibose adenine
  modified_base 15: mod_base = um
  modified_base 16: mod_base = OTHER; note = 2-fluororibose guanine
  modified_base 17: mod_base = um
  modified_base 18: mod_base = OTHER; note = 2-fluororibose cytosine
  modified_base 19: mod_base = cm
  modified_base 19..20: mod_base = OTHER; note = phosphorothioate
  modified_base 20: mod_base = um
  modified_base 20..21: mod_base = OTHER; note = phosphorothioate
  modified_base 21: mod_base = um
  source 1..21: mol_type = other RNA
ttgtgatccaaaaatgtcctt

SEQ ID NO: 77 - RNA, 21 nt, synthetic construct
  misc_feature 1..21: note = Synthetic: WV-38303
  misc_feature 1..21: note = Synthetic: SSR-0103755
  modified_base 1: mod_base = OTHER; note = 2-fluororibose uracil
  modified_base 1..2: mod_base = OTHER; note = phosphorothioate
  modified_base 2: mod_base = OTHER; note = 2-fluororibose uracil
  modified_base 2..3: mod_base = OTHER; note = phosphorothioate
  modified_base 3: mod_base = um
  modified_base 4: mod_base = OTHER; note = 2-fluororibose guanine
  modified_base 5: mod_base = um
  modified_base 6: mod_base = OTHER; note = 2-fluororibose guanine
  modified_base 7: mod_base = OTHER; note = 2-O-methylribose adenine
  modified_base 8: mod_base = OTHER; note = 2-fluororibose uracil
  modified_base 9: mod_base = cm
  modified_base 10: mod_base = OTHER; note = 2-fluororibose cytosine
  modified_base 11: mod_base = OTHER; note = 2-O-methylribose adenine
  modified_base 12: mod_base = OTHER; note = 2-O-methylribose adenine
  modified_base 13: mod_base = OTHER; note = 2-O-methylribose adenine
  modified_base 14: mod_base = OTHER; note = 2-fluororibose adenine
  modified_base 15: mod_base = OTHER; note = 2-O-methylribose adenine
  modified_base 16: mod_base = OTHER; note = 2-fluororibose uracil
  modified_base 17: mod_base = gm
  modified_base 18: mod_base = OTHER; note = 2-fluororibose uracil
  modified_base 19: mod_base = cm
  modified_base 19..20: mod_base = OTHER; note = phosphorothioate
  modified_base 20: mod_base = um
  modified_base 20..21: mod_base = OTHER; note = phosphorothioate
  modified_base 21: mod_base = um
  source 1..21: mol_type = other RNA
tttgtgatccaaaaatgtctt

SEQ ID NO: 78 - RNA, 21 nt, synthetic construct
  misc_feature 1..21: note = Synthetic: WV-38304
  misc_feature 1..21: note = Synthetic: SSR-0103765
  modified_base 1: mod_base = OTHER; note = 2-fluororibose uracil
  modified_base 1..2: mod_base = OTHER; note = phosphorothioate
  modified_base 2: mod_base = OTHER; note = 2-fluororibose uracil
  modified_base 2..3: mod_base = OTHER; note = phosphorothioate
  modified_base 3: mod_base = um
  modified_base 4: mod_base = OTHER; note = 2-fluororibose uracil
  modified_base 5: mod_base = gm
  modified_base 6: mod_base = OTHER; note = 2-fluororibose uracil
  modified_base 7: mod_base = gm
  modified_base 8: mod_base = OTHER; note = 2-fluororibose adenine
  modified_base 9: mod_base = um
  modified_base 10: mod_base = OTHER; note = 2-fluororibose cytosine
  modified_base 11: mod_base = cm
  modified_base 12: mod_base = OTHER; note = 2-O-methylribose adenine
  modified_base 13: mod_base = OTHER; note = 2-O-methylribose adenine
  modified_base 14: mod_base = OTHER; note = 2-fluororibose adenine
  modified_base 15: mod_base = OTHER; note = 2-O-methylribose adenine
  modified_base 16: mod_base = OTHER; note = 2-fluororibose adenine
  modified_base 17: mod_base = um
  modified_base 18: mod_base = OTHER; note = 2-fluororibose guanine
  modified_base 19: mod_base = um
  modified_base 19..20: mod_base = OTHER; note = phosphorothioate
  modified_base 20: mod_base = um
  modified_base 20..21: mod_base = OTHER; note = phosphorothioate
  modified_base 21: mod_base = um
  source 1..21: mol_type = other RNA
ttttgtgatccaaaaatgttt

SEQ ID NO: 79 - RNA, 21 nt, synthetic construct
  misc_feature 1..21: note = Synthetic: WV-38305
  misc_feature 1..21: note = Synthetic: SSR-0103664
  modified_base 1: mod_base = OTHER; note = 2-fluororibose uracil
  modified_base 1..2: mod_base = OTHER; note = phosphorothioate
  modified_base 2: mod_base = OTHER; note = 2-fluororibose guanine
  modified_base 2..3: mod_base = OTHER; note = phosphorothioate
  modified_base 3: mod_base = OTHER; note = 2-O-methylribose adenine
  modified_base 4: mod_base = OTHER; note = 2-fluororibose adenine
  modified_base 5: mod_base = gm
  modified_base 6: mod_base = OTHER; note = 2-fluororibose uracil
  modified_base 7: mod_base = gm
  modified_base 8: mod_base = OTHER; note = 2-fluororibose cytosine
  modified_base 9: mod_base = um
  modified_base 10: mod_base = OTHER; note = 2-fluororibose uracil
  modified_base 11: mod_base = um
  modified_base 12: mod_base = um
  modified_base 13: mod_base = gm
  modified_base 14: mod_base = OTHER; note = 2-fluororibose uracil
  modified_base 15: mod_base = gm
  modified_base 16: mod_base = OTHER; note = 2-fluororibose adenine
  modified_base 17: mod_base = um
  modified_base 18: mod_base = OTHER; note = 2-fluororibose cytosine
  modified_base 19: mod_base = cm
  modified_base 19..20: mod_base = OTHER; note = phosphorothioate
  modified_base 20: mod_base = um
  modified_base 20..21: mod_base = OTHER; note = phosphorothioate
  modified_base 21: mod_base = um
  source 1..21: mol_type = other RNA
tgaagtgcttttgtgatcctt

SEQ ID NO: 80 - RNA, 21 nt, synthetic construct
  misc_feature 1..21: note = Synthetic: WV-38306
  misc_feature 1..21: note = Synthetic: SSR-0103595
  modified_base 1: mod_base = OTHER; note = 2-fluororibose uracil
  modified_base 1..2: mod_base = OTHER; note = phosphorothioate
  modified_base 2: mod_base = OTHER; note = 2-fluororibose adenine
  modified_base 2..3: mod_base = OTHER; note = phosphorothioate
  modified_base 3: mod_base = gm
  modified_base 4: mod_base = OTHER; note = 2-fluororibose adenine
  modified_base 5: mod_base = OTHER; note = 2-O-methylribose adenine
  modified_base 6: mod_base = OTHER; note = 2-fluororibose guanine
  modified_base 7: mod_base = um
  modified_base 8: mod_base = OTHER; note = 2-fluororibose guanine
  modified_base 9: mod_base = cm
  modified_base 10: mod_base = OTHER; note = 2-fluororibose uracil
  modified_base 11: mod_base = um
  modified_base 12: mod_base = um
  modified_base 13: mod_base = um
  modified_base 14: mod_base = OTHER; note = 2-fluororibose guanine
  modified_base 15: mod_base = um
  modified_base 16: mod_base = OTHER; note = 2-fluororibose guanine
  modified_base 17: mod_base = OTHER; note = 2-O-methylribose adenine
  modified_base 18: mod_base = OTHER; note = 2-fluororibose uracil
  modified_base 19: mod_base = cm
  modified_base 19..20: mod_base = OTHER; note = phosphorothioate
  modified_base 20: mod_base = um
  modified_base 20..21: mod_base = OTHER; note = phosphorothioate
  modified_base 21: mod_base = um
  source 1..21: mol_type = other RNA
tagaagtgcttttgtgatctt

SEQ ID NO: 81 - RNA, 21 nt, synthetic construct
  misc_feature 1..21: note = Synthetic: WV-38307
  misc_feature 1..21: note = Synthetic: SSR-0103677
  modified_base 1: mod_base = OTHER; note = 2-fluororibose uracil
  modified_base 1..2: mod_base = OTHER; note = phosphorothioate
  modified_base 2: mod_base = OTHER; note = 2-fluororibose guanine
  modified_base 2..3: mod_base = OTHER; note = phosphorothioate
  modified_base 3: mod_base = gm
  modified_base 4: mod_base = OTHER; note = 2-fluororibose adenine
  modified_base 5: mod_base = OTHER; note = 2-O-methylribose adenine
  modified_base 6: mod_base = OTHER; note = 2-fluororibose guanine
  modified_base 7: mod_base = OTHER; note = 2-O-methylribose adenine
  modified_base 8: mod_base = OTHER; note = 2-fluororibose adenine
  modified_base 9: mod_base = gm
  modified_base 10: mod_base = OTHER; note = 2-fluororibose uracil
  modified_base 11: mod_base = gm
  modified_base 12: mod_base = cm
  modified_base 13: mod_base = um
  modified_base 14: mod_base = OTHER; note = 2-fluororibose uracil
  modified_base 15: mod_base = um
  modified_base 16: mod_base = OTHER; note = 2-fluororibose uracil
  modified_base 17: mod_base = gm
  modified_base 18: mod_base = OTHER; note = 2-fluororibose uracil
  modified_base 19: mod_base = gm
  modified_base 19..20: mod_base = OTHER; note = phosphorothioate
  modified_base 20: mod_base = um
  modified_base 20..21: mod_base = OTHER; note = phosphorothioate
  modified_base 21: mod_base = um
  source 1..21: mol_type = other RNA
tggaagaagtgcttttgtgtt

SEQ ID NO: 82 - RNA, 21 nt, synthetic construct
  misc_feature 1..21: note = Synthetic: WV-38308
  misc_feature 1..21: note = Synthetic: SSR-0103728
  modified_base 1: mod_base = OTHER; note = 2-fluororibose uracil
  modified_base 1..2: mod_base = OTHER; note = phosphorothioate
  modified_base 2: mod_base = OTHER; note = 2-fluororibose uracil
  modified_base 2..3: mod_base = OTHER; note = phosphorothioate
  modified_base 3: mod_base = gm
  modified_base 4: mod_base = OTHER; note = 2-fluororibose guanine
  modified_base 5: mod_base = OTHER; note = 2-O-methylribose adenine
  modified_base 6: mod_base = OTHER; note = 2-fluororibose adenine
  modified_base 7: mod_base = gm
  modified_base 8: mod_base = OTHER; note = 2-fluororibose adenine
  modified_base 9: mod_base = OTHER; note = 2-O-methylribose adenine
  modified_base 10: mod_base = OTHER; note = 2-fluororibose guanine
  modified_base 11: mod_base = um
  modified_base 12: mod_base = gm
  modified_base 13: mod_base = cm
  modified_base 14: mod_base = OTHER; note = 2-fluororibose uracil
  modified_base 15: mod_base = um
  modified_base 16: mod_base = OTHER; note = 2-fluororibose uracil
  modified_base 17: mod_base = um
  modified_base 18: mod_base = OTHER; note = 2-fluororibose guanine
  modified_base 19: mod_base = um
  modified_base 19..20: mod_base = OTHER; note = phosphorothioate
  modified_base 20: mod_base = um
  modified_base 20..21: mod_base = OTHER; note = phosphorothioate
  modified_base 21: mod_base = um
  source 1..21: mol_type = other RNA
ttggaagaagtgcttttgttt

SEQ ID NO: 83 - RNA, 21 nt, synthetic construct
  misc_feature 1..21: note = Synthetic: WV-38309
  misc_feature 1..21: note = Synthetic: SSR-0103644
  modified_base 1: mod_base = OTHER; note = 2-fluororibose uracil
  modified_base 1..2: mod_base = OTHER; note = phosphorothioate
  modified_base 2: mod_base = OTHER; note = 2-fluororibose cytosine
  modified_base 2..3: mod_base = OTHER; note = phosphorothioate
  modified_base 3: mod_base = gm
  modified_base 4: mod_base = OTHER; note = 2-fluororibose adenine
  modified_base 5: mod_base = um
  modified_base 6: mod_base = OTHER; note = 2-fluororibose guanine
  modified_base 7: mod_base = gm
  modified_base 8: mod_base = OTHER; note = 2-fluororibose adenine
  modified_base 9: mod_base = OTHER; note = 2-O-methylribose adenine
  modified_base 10: mod_base = OTHER; note = 2-fluororibose guanine
  modified_base 11: mod_base = OTHER; note = 2-O-methylribose adenine
  modified_base 12: mod_base = OTHER; note = 2-O-methylribose adenine
  modified_base 13: mod_base = gm
  modified_base 14: mod_base = OTHER; note = 2-fluororibose uracil
  modified_base 15: mod_base = gm
  modified_base 16: mod_base = OTHER; note = 2-fluororibose cytosine
  modified_base 17: mod_base = um
  modified_base 18: mod_base = OTHER; note = 2-fluororibose uracil
  modified_base 19: mod_base = um
  modified_base 19..20: mod_base = OTHER; note = phosphorothioate
  modified_base 20: mod_base = um
  modified_base 20..21: mod_base = OTHER; note = phosphorothioate
  modified_base 21: mod_base = um
  source 1..21: mol_type = other RNA
tcgatggaagaagtgcttttt

SEQ ID NO: 84 - RNA, 21 nt, synthetic construct
  misc_feature 1..21: note = Synthetic: WV-38310
  misc_feature 1..21: note = Synthetic: SSR-0103687
  modified_base 1: mod_base = OTHER; note = 2-fluororibose uracil
  modified_base 1..2: mod_base = OTHER; note = phosphorothioate
  modified_base 2: mod_base = OTHER; note = 2-fluororibose guanine
  modified_base 2..3: mod_base = OTHER; note = phosphorothioate
  modified_base 3: mod_base = um
  modified_base 4: mod_base = OTHER; note = 2-fluororibose guanine
  modified_base 5: mod_base = gm
  modified_base 6: mod_base = OTHER; note = 2-fluororibose cytosine
  modified_base 7: mod_base = cm
  modified_base 8: mod_base = OTHER; note = 2-fluororibose adenine
  modified_base 9: mod_base = um
  modified_base 10: mod_base = OTHER; note = 2-fluororibose guanine
  modified_base 11: mod_base = OTHER; note = 2-O-methylribose adenine
  modified_base 12: mod_base = um
  modified_base 13: mod_base = um
  modified_base 14: mod_base = OTHER; note = 2-fluororibose uracil
  modified_base 15: mod_base = cm
  modified_base 16: mod_base = OTHER; note = 2-fluororibose uracil
  modified_base 17: mod_base = cm
  modified_base 18: mod_base = OTHER; note = 2-fluororibose uracil
  modified_base 19: mod_base = cm
  modified_base 19..20: mod_base = OTHER; note = phosphorothioate
  modified_base 20: mod_base = um
  modified_base 20..21: mod_base = OTHER; note = phosphorothioate
  modified_base 21: mod_base = um
  source 1..21: mol_type = other RNA
tgtggccatgatttctctctt

SEQ ID NO: 85 - RNA, 21 nt, synthetic construct
  misc_feature 1..21: note = Synthetic: WV-38311
  misc_feature 1..21: note = Synthetic: SSR-0103727
  modified_base 1: mod_base = OTHER; note = 2-fluororibose uracil
  modified_base 1..2: mod_base = OTHER; note = phosphorothioate
  modified_base 2: mod_base = OTHER; note = 2-fluororibose uracil
  modified_base 2..3: mod_base = OTHER; note = phosphorothioate
  modified_base 3: mod_base = gm
  modified_base 4: mod_base = OTHER; note = 2-fluororibose cytosine
  modified_base 5: mod_base = um
  modified_base 6: mod_base = OTHER; note = 2-fluororibose guanine
  modified_base 7: mod_base = gm
  modified_base 8: mod_base = OTHER; note = 2-fluororibose adenine
  modified_base 9: mod_base = OTHER; note = 2-O-methylribose adenine
  modified_base 10: mod_base = OTHER; note = 2-fluororibose cytosine
  modified_base 11: mod_base = OTHER; note = 2-O-methylribose adenine
  modified_base 12: mod_base = OTHER; note = 2-O-methylribose adenine
  modified_base 13: mod_base = um
  modified_base 14: mod_base = OTHER; note = 2-fluororibose adenine
  modified_base 15: mod_base = um
  modified_base 16: mod_base = OTHER; note = 2-fluororibose guanine
  modified_base 17: mod_base = gm
  modified_base 18: mod_base = OTHER; note = 2-fluororibose guanine
  modified_base 19: mod_base = OTHER; note = 2-O-methylribose adenine
  modified_base 19..20: mod_base = OTHER; note = phosphorothioate
  modified_base 20: mod_base = um
  modified_base 20..21: mod_base = OTHER; note = phosphorothioate
  modified_base 21: mod_base = um
  source 1..21: mol_type = other RNA
ttgctggaacaatatgggatt

SEQ ID NO: 86 - RNA, 21 nt, synthetic construct
  misc_feature 1..21: note = Synthetic: WV-38312
  misc_feature 1..21: note = Synthetic: SSR-0103749
  modified_base 1: mod_base = OTHER; note = 2-fluororibose uracil
  modified_base 1..2: mod_base = OTHER; note = phosphorothioate
  modified_base 2: mod_base = OTHER; note = 2-fluororibose uracil
  modified_base 2..3: mod_base = OTHER; note = phosphorothioate
  modified_base 3: mod_base = um
  modified_base 4: mod_base = OTHER; note = 2-fluororibose guanine
  modified_base 5: mod_base = cm
  modified_base 6: mod_base = OTHER; note = 2-fluororibose uracil
  modified_base 7: mod_base = gm
  modified_base 8: mod_base = OTHER; note = 2-fluororibose guanine
  modified_base 9: mod_base = OTHER; note = 2-O-methylribose adenine
  modified_base 10: mod_base = OTHER; note = 2-fluororibose adenine
  modified_base 11: mod_base = cm
  modified_base 12: mod_base = OTHER; note = 2-O-methylribose adenine
  modified_base 13: mod_base = OTHER; note = 2-O-methylribose adenine
  modified_base 14: mod_base = OTHER; note = 2-fluororibose uracil
  modified_base 15: mod_base = OTHER; note = 2-O-methylribose adenine
  modified_base 16: mod_base = OTHER; note = 2-fluororibose uracil
  modified_base 17: mod_base = gm
  modified_base 18: mod_base = OTHER; note = 2-fluororibose guanine
  modified_base 19: mod_base = gm
  modified_base 19..20: mod_base = OTHER; note = phosphorothioate
  modified_base 20: mod_base = um
  modified_base 20..21: mod_base = OTHER; note = phosphorothioate
  modified_base 21: mod_base = um
  source 1..21: mol_type = other RNA
tttgctggaacaatatgggtt

SEQ ID NO: 87 - RNA, 21 nt, synthetic construct
  misc_feature 1..21: note = Synthetic: WV-38313
  misc_feature 1..21: note = Synthetic: SSR-0103762
  modified_base 1: mod_base = OTHER; note = 2-fluororibose uracil
  modified_base 1..2: mod_base = OTHER; note = phosphorothioate
  modified_base 2: mod_base = OTHER; note = 2-fluororibose uracil
  modified_base 2..3: mod_base = OTHER; note = phosphorothioate
  modified_base 3: mod_base = um
  modified_base 4: mod_base = OTHER; note = 2-fluororibose uracil
  modified_base 5: mod_base = gm
  modified_base 6: mod_base = OTHER; note = 2-fluororibose cytosine
  modified_base 7: mod_base = um
  modified_base 8: mod_base = OTHER; note = 2-fluororibose guanine
  modified_base 9: mod_base = gm
  modified_base 10: mod_base = OTHER; note = 2-fluororibose adenine
  modified_base 11: mod_base = OTHER; note = 2-O-methylribose adenine
  modified_base 12: mod_base = cm
  modified_base 13: mod_base = OTHER; note = 2-O-methylribose adenine
  modified_base 14: mod_base = OTHER; note = 2-fluororibose adenine
  modified_base 15: mod_base = um
  modified_base 16: mod_base = OTHER; note = 2-fluororibose adenine
  modified_base 17: mod_base = um
  modified_base 18: mod_base = OTHER; note = 2-fluororibose guanine
  modified_base 19: mod_base = gm
  modified_base 19..20: mod_base = OTHER; note = phosphorothioate
  modified_base 20: mod_base = um
  modified_base 20..21: mod_base = OTHER; note = phosphorothioate
  modified_base 21: mod_base = um
  source 1..21: mol_type = other RNA
ttttgctggaacaatatggtt

SEQ ID NO: 88 - RNA, 21 nt, synthetic construct
  misc_feature 1..21: note = Synthetic: WV-38314
  misc_feature 1..21: note = Synthetic: SSR-0103628
  modified_base 1: mod_base = OTHER; note = 2-fluororibose uracil
  modified_base 1..2: mod_base = OTHER; note = phosphorothioate
  modified_base 2: mod_base = OTHER; note = 2-fluororibose adenine
  modified_base 2..3: mod_base = OTHER; note = phosphorothioate
  modified_base 3: mod_base = um
  modified_base 4: mod_base = OTHER; note = 2-fluororibose uracil
  modified_base 5: mod_base = um
  modified_base 6: mod_base = OTHER; note = 2-fluororibose guanine
  modified_base 7: mod_base = cm
  modified_base 8: mod_base = OTHER; note = 2-fluororibose uracil
  modified_base 9: mod_base = gm
  modified_base 10: mod_base = OTHER; note = 2-fluororibose guanine
  modified_base 11: mod_base = OTHER; note = 2-O-methylribose adenine
  modified_base 12: mod_base = OTHER; note = 2-O-methylribose adenine
  modified_base 13: mod_base = cm
  modified_base 14: mod_base = OTHER; note = 2-fluororibose adenine
  modified_base 15: mod_base = OTHER; note = 2-O-methylribose adenine
  modified_base 16: mod_base = OTHER; note = 2-fluororibose uracil
  modified_base 17: mod_base = OTHER; note = 2-O-methylribose adenine
  modified_base 18: mod_base = OTHER; note = 2-fluororibose uracil
  modified_base 19: mod_base = gm
  modified_base 19..20: mod_base = OTHER; note = phosphorothioate
  modified_base 20: mod_base = um
  modified_base 20..21: mod_base = OTHER; note = phosphorothioate
  modified_base 21: mod_base = um
  source 1..21: mol_type = other RNA
tatttgctggaacaatatgtt

SEQ ID NO: 89 - RNA, 21 nt, synthetic construct
  misc_feature 1..21: note = Synthetic: WV-38315
  misc_feature 1..21: note = Synthetic: SSR-0103585
  modified_base 1: mod_base = OTHER; note = 2-fluororibose uracil
  modified_base 1..2: mod_base = OTHER; note = phosphorothioate
  modified_base 2: mod_base = OTHER; note = 2-fluororibose adenine
  modified_base 2..3: mod_base = OTHER; note = phosphorothioate
  modified_base 3: mod_base = OTHER; note = 2-O-methylribose adenine
  modified_base 4: mod_base = OTHER; note = 2-fluororibose uracil
  modified_base 5: mod_base = um
  modified_base 6: mod_base = OTHER; note = 2-fluororibose uracil
  modified_base 7: mod_base = gm
  modified_base 8: mod_base = OTHER; note = 2-fluororibose cytosine
  modified_base 9: mod_base = um
  modified_base 10: mod_base = OTHER; note = 2-fluororibose guanine
  modified_base 11: mod_base = gm
  modified_base 12: mod_base = OTHER; note = 2-O-methylribose adenine
  modified_base 13: mod_base = OTHER; note = 2-O-methylribose adenine
  modified_base 14: mod_base = OTHER; note = 2-fluororibose cytosine
  modified_base 15: mod_base = OTHER; note = 2-O-methylribose adenine
  modified_base 16: mod_base = OTHER; note = 2-fluororibose adenine
  modified_base 17: mod_base = um
  modified_base 18: mod_base = OTHER; note = 2-fluororibose adenine
  modified_base 19: mod_base = um
  modified_base 19..20: mod_base = OTHER; note = phosphorothioate
  modified_base 20: mod_base = um
  modified_base 20..21: mod_base = OTHER; note = phosphorothioate
  modified_base 21: mod_base = um
  source 1..21: mol_type = other RNA
taatttgctggaacaatattt

SEQ ID NO: 90 - RNA, 21 nt, synthetic construct
  misc_feature 1..21: note = Synthetic: WV-38316
  misc_feature 1..21: note = Synthetic: SSR-0103685
  modified_base 1: mod_base = OTHER; note = 2-fluororibose uracil
  modified_base 1..2: mod_base = OTHER; note = phosphorothioate
  modified_base 2: mod_base = OTHER; note = 2-fluororibose guanine
  modified_base 2..3: mod_base = OTHER; note = phosphorothioate
  modified_base 3: mod_base = um
  modified_base 4: mod_base = OTHER; note = 2-fluororibose guanine
  modified_base 5: mod_base = OTHER; note = 2-O-methylribose adenine
  modified_base 6: mod_base = OTHER; note = 2-fluororibose adenine
  modified_base 7: mod_base = OTHER; note = 2-O-methylribose adenine
  modified_base 8: mod_base = OTHER; note = 2-fluororibose guanine
  modified_base 9: mod_base = cm
  modified_base 10: mod_base = OTHER; note = 2-fluororibose cytosine
  modified_base 11: mod_base = OTHER; note = 2-O-methylribose adenine
  modified_base 12: mod_base = OTHER; note = 2-O-methylribose adenine
  modified_base 13: mod_base = cm
  modified_base 14: mod_base = OTHER; note = 2-fluororibose adenine
  modified_base 15: mod_base = gm
  modified_base 16: mod_base = OTHER; note = 2-fluororibose cytosine
  modified_base 17: mod_base = gm
  modified_base 18: mod_base = OTHER; note = 2-fluororibose guanine
  modified_base 19: mod_base = cm
  modified_base 19..20: mod_base = OTHER; note = phosphorothioate
  modified_base 20: mod_base = um
  modified_base 20..21: mod_base = OTHER; note = phosphorothioate
  modified_base 21: mod_base = um
  source 1..21: mol_type = other RNA
tgtgaaagccaacagcggctt

SEQ ID NO: 91 - RNA, 21 nt, synthetic construct
  misc_feature 1..21: note = Synthetic: WV-38317
  misc_feature 1..21: note = Synthetic: SSR-0103652
  modified_base 1: mod_base = OTHER; note = 2-fluororibose uracil
  modified_base 1..2: mod_base = OTHER; note = phosphorothioate
  modified_base 2: mod_base = OTHER; note = 2-fluororibose cytosine
  modified_base 2..3: mod_base = OTHER; note = phosphorothioate
  modified_base 3: mod_base = um
  modified_base 4: mod_base = OTHER; note = 2-fluororibose guanine
  modified_base 5: mod_base = um
  modified_base 6: mod_base = OTHER; note = 2-fluororibose guanine
  modified_base 7: mod_base = OTHER; note = 2-O-methylribose adenine
  modified_base 8: mod_base = OTHER; note = 2-fluororibose adenine
  modified_base 9: mod_base = OTHER; note = 2-O-methylribose adenine
  modified_base 10: mod_base = OTHER; note = 2-fluororibose guanine
  modified_base 11: mod_base = cm
  modified_base 12: mod_base = cm
  modified_base 13: mod_base = OTHER; note = 2-O-methylribose adenine
  modified_base 14: mod_base = OTHER; note = 2-fluororibose adenine
  modified_base 15: mod_base = cm
  modified_base 16: mod_base = OTHER; note = 2-fluororibose adenine
  modified_base 17: mod_base = gm
  modified_base 18: mod_base = OTHER; note = 2-fluororibose cytosine
  modified_base 19: mod_base = gm
  modified_base 19..20: mod_base = OTHER; note = phosphorothioate
  modified_base 20: mod_base = um
  modified_base 20..21: mod_base = OTHER; note = phosphorothioate
  modified_base 21: mod_base = um
  source 1..21: mol_type = other RNA
tctgtgaaagccaacagcgtt

SEQ ID NO: 92 - RNA, 21 nt, synthetic construct
  misc_feature 1..21: note = Synthetic: WV-38318
  misc_feature 1..21: note = Synthetic: SSR-0103632
  modified_base 1: mod_base = OTHER; note = 2-fluororibose uracil
  modified_base 1..2: mod_base = OTHER; note = phosphorothioate
  modified_base 2: mod_base = OTHER; note = 2-fluororibose cytosine
  modified_base 2..3: mod_base = OTHER; note = phosphorothioate
  modified_base 3: mod_base = OTHER; note = 2-O-methylribose adenine
  modified_base 4: mod_base = OTHER; note = 2-fluororibose guanine
  modified_base 5: mod_base = OTHER; note = 2-O-methylribose adenine
  modified_base 6: mod_base = OTHER; note = 2-fluororibose cytosine
  modified_base 7: mod_base = cm
  modified_base 8: mod_base = OTHER; note = 2-fluororibose uracil
  modified_base 9: mod_base = cm
  modified_base 10: mod_base = OTHER; note = 2-fluororibose uracil
  modified_base 11: mod_base = gm
  modified_base 12: mod_base = um
  modified_base 13: mod_base = gm
  modified_base 14: mod_base = OTHER; note = 2-fluororibose adenine
  modified_base 15: mod_base = OTHER; note = 2-O-methylribose adenine
  modified_base 16: mod_base = OTHER; note = 2-fluororibose adenine
  modified_base 17: mod_base = gm
  modified_base 18: mod_base = OTHER; note = 2-fluororibose cytosine
  modified_base 19: mod_base = cm
  modified_base 19..20: mod_base = OTHER; note = phosphorothioate
  modified_base 20: mod_base = um
  modified_base 20..21: mod_base = OTHER; note = phosphorothioate
  modified_base 21: mod_base = um
  source 1..21: mol_type = other RNA
tcagacctctgtgaaagcctt

SEQ ID NO: 93 - RNA, 21 nt, synthetic construct
  misc_feature 1..21: note = Synthetic: WV-38319
  misc_feature 1..21: note = Synthetic: SSR-0103683
  modified_base 1: mod_base = OTHER; note = 2-fluororibose uracil
  modified_base 1..2: mod_base = OTHER; note = phosphorothioate
  modified_base 2: mod_base = OTHER; note = 2-fluororibose guanine
  modified_base 2..3: mod_base = OTHER; note = phosphorothioate
  modified_base 3: mod_base = um
  modified_base 4: mod_base = OTHER; note = 2-fluororibose cytosine
  modified_base 5: mod_base = OTHER; note = 2-O-methylribose adenine
  modified_base 6: mod_base = OTHER; note = 2-fluororibose guanine
  modified_base 7: mod_base = OTHER; note = 2-O-methylribose adenine
  modified_base 8: mod_base = OTHER; note = 2-fluororibose cytosine
  modified_base 9: mod_base = cm
  modified_base 10: mod_base = OTHER; note = 2-fluororibose uracil
  modified_base 11: mod_base = cm
  modified_base 12: mod_base = um
  modified_base 13: mod_base = gm
  modified_base 14: mod_base = OTHER; note = 2-fluororibose uracil
  modified_base 15: mod_base = gm
  modified_base 16: mod_base = OTHER; note = 2-fluororibose adenine
  modified_base 17: mod_base = OTHER; note = 2-O-methylribose adenine
  modified_base 18: mod_base = OTHER; note = 2-fluororibose adenine
  modified_base 19: mod_base = gm
  modified_base 19..20: mod_base = OTHER; note = phosphorothioate
  modified_base 20: mod_base = um
  modified_base 20..21: mod_base = OTHER; note = phosphorothioate
  modified_base 21: mod_base = um
  source 1..21: mol_type = other RNA
tgtcagacctctgtgaaagtt

SEQ ID NO: 94 - RNA, 21 nt, synthetic construct
  misc_feature 1..21: note = Synthetic: WV-38320
  misc_feature 1..21: note = Synthetic: SSR-0103648
  modified_base 1: mod_base = OTHER; note = 2-fluororibose uracil
  modified_base 1..2: mod_base = OTHER; note = phosphorothioate
  modified_base 2: mod_base = OTHER; note = 2-fluororibose cytosine
  modified_base 2..3: mod_base = OTHER; note = phosphorothioate
  modified_base 3: mod_base = um
  modified_base 4: mod_base = OTHER; note = 2-fluororibose guanine
  modified_base 5: mod_base = OTHER; note = 2-O-methylribose adenine
  modified_base 6: mod_base = OTHER; note = 2-fluororibose uracil
  modified_base 7: mod_base = gm
  modified_base 8: mod_base = OTHER; note = 2-fluororibose uracil
  modified_base 9: mod_base = cm
  modified_base 10: mod_base = OTHER; note = 2-fluororibose adenine
  modified_base 11: mod_base = gm
  modified_base 12: mod_base = OTHER; note = 2-O-methylribose adenine
  modified_base 13: mod_base = cm
  modified_base 14: mod_base = OTHER; note = 2-fluororibose cytosine
  modified_base 15: mod_base = um
  modified_base 16: mod_base = OTHER; note = 2-fluororibose cytosine
  modified_base 17: mod_base = um
  modified_base 18: mod_base = OTHER; note = 2-fluororibose guanine
  modified_base 19: mod_base = um
  modified_base 19..20: mod_base = OTHER; note = phosphorothioate
  modified_base 20: mod_base = um
  modified_base 20..21: mod_base = OTHER; note = phosphorothioate
  modified_base 21: mod_base = um
  source 1..21: mol_type = other RNA
tctgatgtcagacctctgttt

SEQ ID NO: 95 - RNA, 21 nt, synthetic construct
  misc_feature 1..21: note = Synthetic: WV-38321
  misc_feature 1..21: note = Synthetic: SSR-0103716
  modified_base 1: mod_base = OTHER; note = 2-fluororibose uracil
  modified_base 1..2: mod_base = OTHER; note = phosphorothioate
  modified_base 2: mod_base = OTHER; note = 2-fluororibose uracil
  modified_base 2..3: mod_base = OTHER; note = phosphorothioate
  modified_base 3: mod_base = cm
  modified_base 4: mod_base = OTHER; note = 2-fluororibose uracil
  modified_base 5: mod_base = gm
  modified_base 6: mod_base = OTHER; note = 2-fluororibose adenine
  modified_base 7: mod_base = um
  modified_base 8: mod_base = OTHER; note = 2-fluororibose guanine
  modified_base 9: mod_base = um
  modified_base 10: mod_base = OTHER; note = 2-fluororibose cytosine
  modified_base 11: mod_base = OTHER; note = 2-O-methylribose adenine
  modified_base 12: mod_base = gm
  modified_base 13: mod_base = OTHER; note = 2-O-methylribose adenine
  modified_base 14: mod_base = OTHER; note = 2-fluororibose cytosine
  modified_base 15: mod_base = cm
  modified_base 16: mod_base = OTHER; note = 2-fluororibose uracil
  modified_base 17: mod_base = cm
  modified_base 18: mod_base = OTHER; note = 2-fluororibose uracil
  modified_base 19: mod_base = gm
  modified_base 19..20: mod_base = OTHER; note = phosphorothioate
  modified_base 20: mod_base = um
  modified_base 20..21: mod_base = OTHER; note = phosphorothioate
  modified_base 21: mod_base = um
  source 1..21: mol_type = other RNA
ttctgatgtcagacctctgtt

SEQ ID NO: 96 - RNA, 21 nt, synthetic construct
  misc_feature 1..21: note = Synthetic: WV-38322
  misc_feature 1..21: note = Synthetic: SSR-0103665
  modified_base 1: mod_base = OTHER; note = 2-fluororibose uracil
  modified_base 1..2: mod_base = OTHER; note = phosphorothioate
  modified_base 2: mod_base = OTHER; note = 2-fluororibose guanine
  modified_base 2..3: mod_base = OTHER; note = phosphorothioate
  modified_base 3: mod_base = OTHER; note = 2-O-methylribose adenine
  modified_base 4: mod_base = OTHER; note = 2-fluororibose adenine
  modified_base 5: mod_base = gm
  modified_base 6: mod_base = OTHER; note = 2-fluororibose uracil
  modified_base 7: mod_base = um
  modified_base 8: mod_base = OTHER; note = 2-fluororibose cytosine
  modified_base 9: mod_base = um
  modified_base 10: mod_base = OTHER; note = 2-fluororibose guanine
  modified_base 11: mod_base = OTHER; note = 2-O-methylribose adenine
  modified_base 12: mod_base = um
  modified_base 13: mod_base = gm
  modified_base 14: mod_base = OTHER; note = 2-fluororibose uracil
  modified_base 15: mod_base = cm
  modified_base 16: mod_base = OTHER; note = 2-fluororibose adenine
  modified_base 17: mod_base = gm
  modified_base 18: mod_base = OTHER; note = 2-fluororibose adenine
  modified_base 19: mod_base = cm
  modified_base 19..20: mod_base = OTHER; note = phosphorothioate
  modified_base 20: mod_base = um
  modified_base 20..21: mod_base = OTHER; note = phosphorothioate
  modified_base 21: mod_base = um
  source 1..21: mol_type = other RNA
tgaagttctgatgtcagactt

SEQ ID NO: 97 - RNA, 21 nt, synthetic construct
  misc_feature 1..21: note = Synthetic: WV-38323
  misc_feature 1..21: note = Synthetic: SSR-0103590
  modified_base 1: mod_base = OTHER; note = 2-fluororibose uracil
  modified_base 1..2: mod_base = OTHER; note = phosphorothioate
  modified_base 2: mod_base = OTHER; note = 2-fluororibose adenine
  modified_base 2..3: mod_base = OTHER; note = phosphorothioate
  modified_base 3: mod_base = cm
  modified_base 4: mod_base = OTHER; note = 2-fluororibose cytosine
  modified_base 5: mod_base = OTHER; note = 2-O-methylribose adenine
  modified_base 6: mod_base = OTHER; note = 2-fluororibose guanine
  modified_base 7: mod_base = um
  modified_base 8: mod_base = OTHER; note = 2-fluororibose uracil
  modified_base 9: mod_base = um
  modified_base 10: mod_base = OTHER; note = 2-fluororibose uracil
  modified_base 11: mod_base = um
  modified_base 12: mod_base = cm
  modified_base 13: mod_base = cm
  modified_base 14: mod_base = OTHER; note = 2-fluororibose cytosine
  modified_base 15: mod_base = OTHER; note = 2-O-methylribose adenine
  modified_base 16: mod_base = OTHER; note = 2-fluororibose adenine
  modified_base 17: mod_base = gm
  modified_base 18: mod_base = OTHER; note = 2-fluororibose guanine
  modified_base 19: mod_base = cm
  modified_base 19..20: mod_base = OTHER; note = phosphorothioate
  modified_base 20: mod_base = um
  modified_base 20..21: mod_base = OTHER; note = phosphorothioate
  modified_base 21: mod_base = um
  source 1..21: mol_type = other RNA
taccagtttttcccaaggctt

SEQ ID NO: 98 - RNA, 21 nt, synthetic construct
  misc_feature 1..21: note = Synthetic: WV-38324
  misc_feature 1..21: note = Synthetic: SSR-0103747
  modified_base 1: mod_base = OTHER; note = 2-fluororibose uracil
  modified_base 1..2: mod_base = OTHER; note = phosphorothioate
  modified_base 2: mod_base = OTHER; note = 2-fluororibose uracil
  modified_base 2..3: mod_base = OTHER; note = phosphorothioate
  modified_base 3: mod_base = um
  modified_base 4: mod_base = OTHER; note = 2-fluororibose guanine
  modified_base 5: mod_base = OTHER; note = 2-O-methylribose adenine
  modified_base 6: mod_base = OTHER; note = 2-fluororibose uracil
  modified_base 7: mod_base = OTHER; note = 2-O-methylribose adenine
  modified_base 8: mod_base = OTHER; note = 2-fluororibose cytosine
  modified_base 9: mod_base = cm
  modified_base 10: mod_base = OTHER; note = 2-fluororibose adenine
  modified_base 11: mod_base = gm
  modified_base 12: mod_base = um
  modified_base 13: mod_base = um
  modified_base 14: mod_base = OTHER; note = 2-fluororibose uracil
  modified_base 15: mod_base = um
  modified_base 16: mod_base = OTHER; note = 2-fluororibose uracil
  modified_base 17: mod_base = cm
  modified_base 18: mod_base = OTHER; note = 2-fluororibose cytosine
  modified_base 19: mod_base = cm
  modified_base 19..20: mod_base = OTHER; note = phosphorothioate
  modified_base 20: mod_base = um
  modified_base 20..21: mod_base = OTHER; note = phosphorothioate
  modified_base 21: mod_base = um
  source 1..21: mol_type = other RNA
tttgataccagtttttccctt

SEQ ID NO: 99 - RNA, 21 nt, synthetic construct
  misc_feature 1..21: note = Synthetic: WV-38325
  misc_feature 1..21: note = Synthetic: SSR-0103760
  modified_base 1: mod_base = OTHER; note = 2-fluororibose uracil
  modified_base 1..2: mod_base = OTHER; note = phosphorothioate
  modified_base 2: mod_base = OTHER; note = 2-fluororibose uracil
  modified_base 2..3: mod_base = OTHER; note = phosphorothioate
  modified_base 3: mod_base = um
  modified_base 4: mod_base = OTHER; note = 2-fluororibose uracil
  modified_base 5: mod_base = gm
  modified_base 6: mod_base = OTHER; note = 2-fluororibose adenine
  modified_base 7: mod_base = um
  modified_base 8: mod_base = OTHER; note = 2-fluororibose adenine
  modified_base 9: mod_base = cm
  modified_base 10: mod_base = OTHER; note = 2-fluororibose cytosine
  modified_base 11: mod_base = OTHER; note = 2-O-methylribose adenine
  modified_base 12: mod_base = gm
  modified_base 13: mod_base = um
  modified_base 14: mod_base = OTHER; note = 2-fluororibose uracil
  modified_base 15: mod_base = um
  modified_base 16: mod_base = OTHER; note = 2-fluororibose uracil
  modified_base 17: mod_base = um
  modified_base 18: mod_base = OTHER; note = 2-fluororibose cytosine
  modified_base 19: mod_base = cm
  modified_base 19..20: mod_base = OTHER; note = phosphorothioate
  modified_base 20: mod_base = um
  modified_base 20..21: mod_base = OTHER; note = phosphorothioate
  modified_base 21: mod_base = um
  source 1..21: mol_type = other RNA
ttttgataccagtttttcctt

SEQ ID NO: 100 - RNA, 21 nt, synthetic construct
  misc_feature 1..21: note = Synthetic: WV-38326
  misc_feature 1..21: note = Synthetic: SSR-0103668
  modified_base 1: mod_base = OTHER; note = 2-fluororibose uracil
  modified_base 1..2: mod_base = OTHER; note = phosphorothioate
  modified_base 2: mod_base = OTHER; note = 2-fluororibose guanine
  modified_base 2..3: mod_base = OTHER; note = phosphorothioate
  modified_base 3: mod_base = OTHER; note = 2-O-methylribose adenine
  modified_base 4: mod_base = OTHER; note = 2-fluororibose guanine
  modified_base 5: mod_base = gm
  modified_base 6: mod_base = OTHER; note = 2-fluororibose uracil
  modified_base 7: mod_base = um
  modified_base 8: mod_base = OTHER; note = 2-fluororibose uracil
  modified_base 9: mod_base = um
  modified_base 10: mod_base = OTHER; note = 2-fluororibose guanine
  modified_base 11: mod_base = OTHER; note = 2-O-methylribose adenine
  modified_base 12: mod_base = um
  modified_base 13: mod_base = OTHER; note = 2-O-methylribose adenine
  modified_base 14: mod_base = OTHER; note = 2-fluororibose cytosine
  modified_base 15: mod_base = cm
  modified_base 16: mod_base = OTHER; note = 2-fluororibose adenine
  modified_base 17: mod_base = gm
  modified_base 18: mod_base = OTHER; note = 2-fluororibose uracil
  modified_base 19: mod_base = um
  modified_base 19..20: mod_base = OTHER; note = phosphorothioate
  modified_base 20: mod_base = um
  modified_base 20..21: mod_base = OTHER; note = phosphorothioate
  modified_base 21: mod_base = um
  source 1..21: mol_type = other RNA
tgaggttttgataccagtttt

SEQ ID NO: 101 - RNA, 21 nt, synthetic construct
  misc_feature 1..21: note = Synthetic: WV-38327
  misc_feature 1..21: note = Synthetic: SSR-0103667
  modified_base 1: mod_base = OTHER; note = 2-fluororibose uracil
  modified_base 1..2: mod_base = OTHER; note = phosphorothioate
  modified_base 2: mod_base = OTHER; note = 2-fluororibose guanine
  modified_base 2..3: mod_base = OTHER; note = phosphorothioate
  modified_base 3: mod_base = OTHER; note = 2-O-methylribose adenine
  modified_base 4: mod_base = OTHER; note = 2-fluororibose cytosine
  modified_base 5: mod_base = OTHER; note = 2-O-methylribose adenine
  modified_base 6: mod_base = OTHER; note = 2-fluororibose uracil
  modified_base 7: mod_base = gm
  modified_base 8: mod_base = OTHER; note = 2-fluororibose adenine
  modified_base 9: mod_base = gm
  modified_base 10: mod_base = OTHER; note = 2-fluororibose guanine
  modified_base 11: mod_base = um
  modified_base 12: mod_base = um
  modified_base 13: mod_base = um
  modified_base 14: mod_base = OTHER; note = 2-fluororibose uracil
  modified_base 15: mod_base = gm
  modified_base 16: mod_base = OTHER; note = 2-fluororibose adenine
  modified_base 17: mod_base = um
  modified_base 18: mod_base = OTHER; note = 2-fluororibose adenine
  modified_base 19: mod_base = cm
  modified_base 19..20: mod_base = OTHER; note = phosphorothioate
  modified_base 20: mod_base = um
  modified_base 20..21: mod_base = OTHER; note = phosphorothioate
  modified_base 21: mod_base = um
  source 1..21: mol_type = other RNA
tgacatgaggttttgatactt

SEQ ID NO: 102 - RNA, 21 nt, synthetic construct
  misc_feature 1..21: note = Synthetic: WV-38328
  misc_feature 1..21: note = Synthetic: SSR-0103734
  modified_base 1: mod_base = OTHER; note = 2-fluororibose uracil
  modified_base 1..2: mod_base = OTHER; note = phosphorothioate
  modified_base 2: mod_base = OTHER; note = 2-fluororibose uracil
  modified_base 2..3: mod_base = OTHER; note = phosphorothioate
  modified_base 3: mod_base = gm
  modified_base 4: mod_base = OTHER; note = 2-fluororibose guanine
  modified_base 5: mod_base = um
  modified_base 6: mod_base = OTHER; note = 2-fluororibose guanine
  modified_base 7: mod_base = OTHER; note = 2-O-methylribose adenine
  modified_base 8: mod_base = OTHER; note = 2-fluororibose adenine
  modified_base 9: mod_base = cm
  modified_base 10: mod_base = OTHER; note = 2-fluororibose cytosine
  modified_base 11: mod_base = cm
  modified_base 12: mod_base = OTHER; note = 2-O-methylribose adenine
  modified_base 13: mod_base = gm
  modified_base 14: mod_base = OTHER; note = 2-fluororibose uracil
  modified_base 15: mod_base = OTHER; note = 2-O-methylribose adenine
  modified_base 16: mod_base = OTHER; note = 2-fluororibose uracil
  modified_base 17: mod_base = um
  modified_base 18: mod_base = OTHER; note = 2-fluororibose cytosine
  modified_base 19: mod_base = OTHER; note = 2-O-methylribose adenine
  modified_base 19..20: mod_base = OTHER; note = phosphorothioate
  modified_base 20: mod_base = um
  modified_base 20..21: mod_base = OTHER; note = phosphorothioate
  modified_base 21: mod_base = um
  source 1..21: mol_type = other RNA
ttggtgaacccagtattcatt

SEQ ID NO: 103 - RNA, 21 nt, synthetic construct
  misc_feature 1..21: note = Synthetic: WV-38329
  misc_feature 1..21: note = Synthetic: SSR-0103752
  modified_base 1: mod_base = OTHER; note = 2-fluororibose uracil
  modified_base 1..2: mod_base = OTHER; note = phosphorothioate
  modified_base 2: mod_base = OTHER; note = 2-fluororibose uracil
  modified_base 2..3: mod_base = OTHER; note = phosphorothioate
  modified_base 3: mod_base = um
  modified_base 4: mod_base = OTHER; note = 2-fluororibose guanine
  modified_base 5: mod_base = gm
  modified_base 6: mod_base = OTHER; note = 2-fluororibose uracil
  modified_base 7: mod_base = gm
  modified_base 8: mod_base = OTHER; note = 2-fluororibose adenine
  modified_base 9: mod_base = OTHER; note = 2-O-methylribose adenine
  modified_base 10: mod_base = OTHER; note = 2-fluororibose cytosine
  modified_base 11: mod_base = cm
  modified_base 12: mod_base = cm
  modified_base 13: mod_base = OTHER; note = 2-O-methylribose adenine
  modified_base 14: mod_base = OTHER; note = 2-fluororibose guanine
  modified_base 15: mod_base = um
  modified_base 16: mod_base = OTHER; note = 2-fluororibose adenine
  modified_base 17: mod_base = um
  modified_base 18: mod_base = OTHER; note = 2-fluororibose uracil
  modified_base 19: mod_base = cm
  modified_base 19..20: mod_base = OTHER; note = phosphorothioate
  modified_base 20: mod_base = um
  modified_base 20..21: mod_base = OTHER; note = phosphorothioate
  modified_base 21: mod_base = um
  source 1..21: mol_type = other RNA
tttggtgaacccagtattctt

SEQ ID NO: 104 - RNA, 21 nt, synthetic construct
  misc_feature 1..21: note = Synthetic: WV-38330
  misc_feature 1..21: note = Synthetic: SSR-0103763
  modified_base 1: mod_base = OTHER; note = 2-fluororibose uracil
  modified_base 1..2: mod_base = OTHER; note = phosphorothioate
  modified_base 2: mod_base = OTHER; note = 2-fluororibose uracil
  modified_base 2..3: mod_base = OTHER; note = phosphorothioate
  modified_base 3: mod_base = um
  modified_base 4: mod_base = OTHER; note = 2-fluororibose uracil
  modified_base 5: mod_base = gm
  modified_base 6: mod_base = OTHER; note = 2-fluororibose guanine
  modified_base 7: mod_base = um
  modified_base 8: mod_base = OTHER; note = 2-fluororibose guanine
  modified_base 9: mod_base = OTHER; note = 2-O-methylribose adenine
  modified_base 10: mod_base = OTHER; note = 2-fluororibose adenine
  modified_base 11: mod_base = cm
  modified_base 12: mod_base = cm
  modified_base 13: mod_base = cm
  modified_base 14: mod_base = OTHER; note = 2-fluororibose adenine
  modified_base 15: mod_base = gm
  modified_base 16: mod_base = OTHER; note = 2-fluororibose uracil
  modified_base 17: mod_base = OTHER; note = 2-O-methylribose adenine
  modified_base 18: mod_base = OTHER; note = 2-fluororibose uracil
  modified_base 19: mod_base = um
  modified_base 19..20: mod_base = OTHER; note = phosphorothioate
  modified_base 20: mod_base = um
  modified_base 20..21: mod_base = OTHER; note = phosphorothioate
  modified_base 21: mod_base = um
  source 1..21: mol_type = other RNA
ttttggtgaacccagtatttt

SEQ ID NO: 105 - RNA, 21 nt, synthetic construct
  misc_feature 1..21: note = Synthetic: WV-38331
  misc_feature 1..21: note = Synthetic: SSR-0103766
  modified_base 1: mod_base = OTHER; note = 2-fluororibose uracil
  modified_base 1..2: mod_base = OTHER; note = phosphorothioate
  modified_base 2: mod_base = OTHER; note = 2-fluororibose uracil
  modified_base 2..3: mod_base = OTHER; note = phosphorothioate
  modified_base 3: mod_base = um
  modified_base 4: mod_base = OTHER; note = 2-fluororibose uracil
  modified_base 5: mod_base = um
  modified_base 6: mod_base = OTHER; note = 2-fluororibose guanine
  modified_base 7: mod_base = gm
  modified_base 8: mod_base = OTHER; note = 2-fluororibose uracil
  modified_base 9: mod_base = gm
  modified_base 10: mod_base = OTHER; note = 2-fluororibose adenine
  modified_base 11: mod_base = OTHER; note = 2-O-methylribose adenine
  modified_base 12: mod_base = cm
  modified_base 13: mod_base = cm
  modified_base 14: mod_base = OTHER; note = 2-fluororibose cytosine
  modified_base 15: mod_base = OTHER; note = 2-O-methylribose adenine
  modified_base 16: mod_base = OTHER; note = 2-fluororibose guanine
  modified_base 17: mod_base = um
  modified_base 18: mod_base = OTHER; note = 2-fluororibose adenine
  modified_base 19: mod_base = um
  modified_base 19..20: mod_base = OTHER; note = phosphorothioate
  modified_base 20: mod_base = um
  modified_base 20..21: mod_base = OTHER; note = phosphorothioate
  modified_base 21: mod_base = um
  source 1..21: mol_type = other RNA
tttttggtgaacccagtattt

SEQ ID NO: 106 - RNA, 21 nt, synthetic construct
  misc_feature 1..21: note = Synthetic: WV-38332
  misc_feature 1..21: note = Synthetic: SSR-0103730
  modified_base 1: mod_base = OTHER; note = 2-fluororibose uracil
  modified_base 1..2: mod_base = OTHER; note = phosphorothioate
  modified_base 2: mod_base = OTHER; note = 2-fluororibose uracil
  modified_base 2..3: mod_base = OTHER; note = phosphorothioate
  modified_base 3: mod_base = gm
  modified_base 4: mod_base = OTHER; note = 2-fluororibose guanine
  modified_base 5: mod_base = OTHER; note = 2-O-methylribose adenine
  modified_base 6: mod_base = OTHER; note = 2-fluororibose uracil
  modified_base 7: mod_base = um
  modified_base 8: mod_base = OTHER; note = 2-fluororibose uracil
  modified_base 9: mod_base = um
  modified_base 10: mod_base = OTHER; note = 2-fluororibose uracil
  modified_base 11: mod_base = gm
  modified_base 12: mod_base = gm
  modified_base 13: mod_base = um
  modified_base 14: mod_base = OTHER; note = 2-fluororibose guanine
  modified_base 15: mod_base = OTHER; note = 2-O-methylribose adenine
  modified_base 16: mod_base = OTHER; note = 2-fluororibose adenine
  modified_base 17: mod_base = cm
  modified_base 18: mod_base = OTHER; note = 2-fluororibose cytosine
  modified_base 19: mod_base = cm
  modified_base 19..20: mod_base = OTHER; note = phosphorothioate
  modified_base 20: mod_base = um
  modified_base 20..21: mod_base = OTHER; note = phosphorothioate
  modified_base 21: mod_base = um
  source 1..21: mol_type = other RNA
ttggatttttggtgaaccctt

SEQ ID NO: 107 - RNA, 21 nt, synthetic construct
  misc_feature 1..21: note = Synthetic: WV-38333
  misc_feature 1..21: note = Synthetic: SSR-0103658
  modified_base 1: mod_base = OTHER; note = 2-fluororibose uracil
  modified_base 1..2: mod_base = OTHER; note = phosphorothioate
  modified_base 2: mod_base = OTHER; note = 2-fluororibose cytosine
  modified_base 2..3: mod_base = OTHER; note = phosphorothioate
  modified_base 3: mod_base = um
  modified_base 4: mod_base = OTHER; note = 2-fluororibose uracil
  modified_base 5: mod_base = gm
  modified_base 6: mod_base = OTHER; note = 2-fluororibose uracil
  modified_base 7: mod_base = gm
  modified_base 8: mod_base = OTHER; note = 2-fluororibose cytosine
  modified_base 9: mod_base = um
  modified_base 10: mod_base = OTHER; note = 2-fluororibose uracil
  modified_base 11: mod_base = gm
  modified_base 12: mod_base = gm
  modified_base 13: mod_base = OTHER; note = 2-O-methylribose adenine
  modified_base 14: mod_base = OTHER; note = 2-fluororibose uracil
  modified_base 15: mod_base = um
  modified_base 16: mod_base = OTHER; note = 2-fluororibose uracil
  modified_base 17: mod_base = um
  modified_base 18: mod_base = OTHER; note = 2-fluororibose uracil
  modified_base 19: mod_base = gm
  modified_base 19..20: mod_base = OTHER; note = phosphorothioate
  modified_base 20: mod_base = um
  modified_base 20..21: mod_base = OTHER; note = phosphorothioate
  modified_base 21: mod_base = um
  source 1..21: mol_type = other RNA
tcttgtgcttggatttttgtt

SEQ ID NO: 108 - RNA, 21 nt, synthetic construct
  misc_feature 1..21: note = Synthetic: WV-38334
  misc_feature 1..21: note = Synthetic: SSR-0103584
  modified_base 1: mod_base = OTHER; note = 2-fluororibose uracil
  modified_base 1..2: mod_base = OTHER; note = phosphorothioate
  modified_base 2: mod_base = OTHER; note = 2-fluororibose adenine
  modified_base 2..3: mod_base = OTHER; note = phosphorothioate
  modified_base 3: mod_base = OTHER; note = 2-O-methylribose adenine
  modified_base 4: mod_base = OTHER; note = 2-fluororibose uracil
  modified_base 5: mod_base = cm
  modified_base 6: mod_base = OTHER; note = 2-fluororibose uracil
  modified_base 7: mod_base = um
  modified_base 8: mod_base = OTHER; note = 2-fluororibose guanine
  modified_base 9: mod_base = um
  modified_base 10: mod_base = OTHER; note = 2-fluororibose guanine
  modified_base 11: mod_base = cm
  modified_base 12: mod_base = um
  modified_base 13: mod_base = um
  modified_base 14: mod_base = OTHER; note = 2-fluororibose guanine
  modified_base 15: mod_base = gm
  modified_base 16: mod_base = OTHER; note = 2-fluororibose adenine
  modified_base 17: mod_base = um
  modified_base 18: mod_base = OTHER; note = 2-fluororibose uracil
  modified_base 19: mod_base = um
  modified_base 19..20: mod_base = OTHER; note = phosphorothioate
  modified_base 20: mod_base = um
  modified_base 20..21: mod_base = OTHER; note = phosphorothioate
  modified_base 21: mod_base = um
  source 1..21: mol_type = other RNA
taatcttgtgcttggattttt

SEQ ID NO: 109 - RNA, 21 nt, synthetic construct
  misc_feature 1..21: note = Synthetic: WV-38335
  misc_feature 1..21: note = Synthetic: SSR-0103693
  modified_base 1: mod_base = OTHER; note = 2-fluororibose uracil
  modified_base 1..2: mod_base = OTHER; note = phosphorothioate
  modified_base 2: mod_base = OTHER; note = 2-fluororibose uracil
  modified_base 2..3: mod_base = OTHER; note = phosphorothioate
  modified_base 3: mod_base = OTHER; note = 2-O-methylribose adenine
  modified_base 4: mod_base = OTHER; note = 2-fluororibose adenine
  modified_base 5: mod_base = um
  modified_base 6: mod_base = OTHER; note = 2-fluororibose cytosine
  modified_base 7: mod_base = um
  modified_base 8: mod_base = OTHER; note = 2-fluororibose uracil
  modified_base 9: mod_base = gm
  modified_base 10: mod_base = OTHER; note = 2-fluororibose uracil
  modified_base 11: mod_base = gm
  modified_base 12: mod_base = cm
  modified_base 13: mod_base = um
  modified_base 14: mod_base = OTHER; note = 2-fluororibose uracil
  modified_base 15: mod_base = gm
  modified_base 16: mod_base = OTHER; note = 2-fluororibose guanine
  modified_base 17: mod_base = OTHER; note = 2-O-methylribose adenine
  modified_base 18: mod_base = OTHER; note = 2-fluororibose uracil
  modified_base 19: mod_base = um
  modified_base 19..20: mod_base = OTHER; note = phosphorothioate
  modified_base 20: mod_base = um
  modified_base 20..21: mod_base = OTHER; note = phosphorothioate
  modified_base 21: mod_base = um
  source 1..21: mol_type = other RNA
ttaatcttgtgcttggatttt

SEQ ID NO: 110 - RNA, 21 nt, synthetic construct
  misc_feature 1..21: note = Synthetic: WV-38336
  misc_feature 1..21: note = Synthetic: SSR-0103587
  modified_base 1: mod_base = OTHER; note = 2-fluororibose uracil
  modified_base 1..2: mod_base = OTHER; note = phosphorothioate
  modified_base 2: mod_base = OTHER; note = 2-fluororibose adenine
  modified_base 2..3: mod_base = OTHER; note = phosphorothioate
  modified_base 3: mod_base = cm
  modified_base 4: mod_base = OTHER; note = 2-fluororibose adenine
  modified_base 5: mod_base = gm
  modified_base 6: mod_base = OTHER; note = 2-fluororibose guanine
  modified_base 7: mod_base = cm
  modified_base 8: mod_base = OTHER; note = 2-fluororibose cytosine
  modified_base 9: mod_base = OTHER; note = 2-O-methylribose adenine
  modified_base 10: mod_base = OTHER; note = 2-fluororibose uracil
  modified_base 11: mod_base = OTHER; note = 2-O-methylribose adenine
  modified_base 12: mod_base = OTHER; note = 2-O-methylribose adenine
  modified_base 13: mod_base = um
  modified_base 14: mod_base = OTHER; note = 2-fluororibose cytosine
  modified_base 15: mod_base = um
  modified_base 16: mod_base = OTHER; note = 2-fluororibose uracil
  modified_base 17: mod_base = gm
  modified_base 18: mod_base = OTHER; note = 2-fluororibose uracil
  modified_base 19: mod_base = gm
  modified_base 19..20: mod_base = OTHER; note = phosphorothioate
  modified_base 20: mod_base = um
  modified_base 20..21: mod_base = OTHER; note = phosphorothioate
  modified_base 21: mod_base = um
  source 1..21: mol_type = other RNA
tacaggccataatcttgtgtt

SEQ ID NO: 111 - RNA, 21 nt, synthetic construct
  misc_feature 1..21: note = Synthetic: WV-38337
  misc_feature 1..21: note = Synthetic: SSR-0103695
  modified_base 1: mod_base = OTHER; note = 2-fluororibose uracil
  modified_base 1..2: mod_base = OTHER; note = phosphorothioate
  modified_base 2: mod_base = OTHER; note = 2-fluororibose uracil
  modified_base 2..3: mod_base = OTHER; note = phosphorothioate
  modified_base 3: mod_base = OTHER; note = 2-O-methylribose adenine
  modified_base 4: mod_base = OTHER; note = 2-fluororibose cytosine
  modified_base 5: mod_base = OTHER; note = 2-O-methylribose adenine
  modified_base 6: mod_base = OTHER; note = 2-fluororibose guanine
  modified_base 7: mod_base = gm
  modified_base 8: mod_base = OTHER; note = 2-fluororibose cytosine
  modified_base 9: mod_base = cm
  modified_base 10: mod_base = OTHER; note = 2-fluororibose adenine
  modified_base 11: mod_base = um
  modified_base 12: mod_base = OTHER; note = 2-O-methylribose adenine
  modified_base 13: mod_base = OTHER; note = 2-O-methylribose adenine
  modified_base 14: mod_base = OTHER; note = 2-fluororibose uracil
  modified_base 15: mod_base = cm
  modified_base 16: mod_base = OTHER; note = 2-fluororibose uracil
  modified_base 17: mod_base = um
  modified_base 18: mod_base = OTHER; note = 2-fluororibose guanine
  modified_base 19: mod_base = um
  modified_base 19..20: mod_base = OTHER; note = phosphorothioate
  modified_base 20: mod_base = um
  modified_base 20..21: mod_base = OTHER; note = phosphorothioate
  modified_base 21: mod_base = um
  source 1..21: mol_type = other RNA
ttacaggccataatcttgttt

SEQ ID NO: 112 - RNA, 21 nt, synthetic construct
  misc_feature 1..21: note = Synthetic: WV-38338
  misc_feature 1..21: note = Synthetic: SSR-0103613
  modified_base 1: mod_base = OTHER; note = 2-fluororibose uracil
  modified_base 1..2: mod_base = OTHER; note = phosphorothioate
  modified_base 2: mod_base = OTHER; note = 2-fluororibose adenine
  modified_base 2..3: mod_base = OTHER; note = phosphorothioate
  modified_base 3: mod_base = um
  modified_base 4: mod_base = OTHER; note = 2-fluororibose adenine
  modified_base 5: mod_base = cm
  modified_base 6: mod_base = OTHER; note = 2-fluororibose adenine
  modified_base 7: mod_base = gm
  modified_base 8: mod_base = OTHER; note = 2-fluororibose guanine
  modified_base 9: mod_base = cm
  modified_base 10: mod_base = OTHER; note = 2-fluororibose cytosine
  modified_base 11: mod_base = OTHER; note = 2-O-methylribose adenine
  modified_base 12: mod_base = um
  modified_base 13: mod_base = OTHER; note = 2-O-methylribose adenine
  modified_base 14: mod_base = OTHER; note = 2-fluororibose adenine
  modified_base 15: mod_base = um
  modified_base 16: mod_base = OTHER; note = 2-fluororibose cytosine
  modified_base 17: mod_base = um
  modified_base 18: mod_base = OTHER; note = 2-fluororibose uracil
  modified_base 19: mod_base = gm
  modified_base 19..20: mod_base = OTHER; note = phosphorothioate
  modified_base 20: mod_base = um
  modified_base 20..21: mod_base = OTHER; note = phosphorothioate
  modified_base 21: mod_base = um
  source 1..21: mol_type = other RNA
tatacaggccataatcttgtt

SEQ ID NO: 113 - RNA, 21 nt, synthetic construct
  misc_feature 1..21: note = Synthetic: WV-38339
  misc_feature 1..21: note = Synthetic: SSR-0103640
  modified_base 1: mod_base = OTHER; note = 2-fluororibose uracil
  modified_base 1..2: mod_base = OTHER; note = phosphorothioate
  modified_base 2: mod_base = OTHER; note = 2-fluororibose cytosine
  modified_base 2..3: mod_base = OTHER; note = phosphorothioate
  modified_base 3: mod_base = cm
  modified_base 4: mod_base = OTHER; note = 2-fluororibose adenine
  modified_base 5: mod_base = OTHER; note = 2-O-methylribose adenine
  modified_base 6: mod_base = OTHER; note = 2-fluororibose uracil
  modified_base 7: mod_base = OTHER; note = 2-O-methylribose adenine
  modified_base 8: mod_base = OTHER; note = 2-fluororibose cytosine
  modified_base 9: mod_base = OTHER; note = 2-O-methylribose adenine
  modified_base 10: mod_base = OTHER; note = 2-fluororibose guanine
  modified_base 11: mod_base = gm
  modified_base 12: mod_base = cm
  modified_base 13: mod_base = cm
  modified_base 14: mod_base = OTHER; note = 2-fluororibose adenine
  modified_base 15: mod_base = um
  modified_base 16: mod_base = OTHER; note = 2-fluororibose adenine
  modified_base 17: mod_base = OTHER; note = 2-O-methylribose adenine
  modified_base 18: mod_base = OTHER; note = 2-fluororibose uracil
  modified_base 19: mod_base = cm
  modified_base 19..20: mod_base = OTHER; note = phosphorothioate
  modified_base 20: mod_base = um
  modified_base 20..21: mod_base = OTHER; note = phosphorothioate
  modified_base 21: mod_base = um
  source 1..21: mol_type = other RNA
tccaatacaggccataatctt

SEQ ID NO: 114 - RNA, 21 nt, synthetic construct
  misc_feature 1..21: note = Synthetic: WV-38340
  misc_feature 1..21: note = Synthetic: SSR-0103651
  modified_base 1: mod_base = OTHER; note = 2-fluororibose uracil
  modified_base 1..2: mod_base = OTHER; note = phosphorothioate
  modified_base 2: mod_base = OTHER; note = 2-fluororibose cytosine
  modified_base 2..3: mod_base = OTHER; note = phosphorothioate
  modified_base 3: mod_base = um
  modified_base 4: mod_base = OTHER; note = 2-fluororibose guanine
  modified_base 5: mod_base = um
  modified_base 6: mod_base = OTHER; note = 2-fluororibose cytosine
  modified_base 7: mod_base = um
  modified_base 8: mod_base = OTHER; note = 2-fluororibose cytosine
  modified_base 9: mod_base = cm
  modified_base 10: mod_base = OTHER; note = 2-fluororibose adenine
  modified_base 11: mod_base = OTHER; note = 2-O-methylribose adenine
  modified_base 12: mod_base = um
  modified_base 13: mod_base = OTHER; note = 2-O-methylribose adenine
  modified_base 14: mod_base = OTHER; note = 2-fluororibose cytosine
  modified_base 15: mod_base = OTHER; note = 2-O-methylribose adenine
  modified_base 16: mod_base = OTHER; note = 2-fluororibose guanine
  modified_base 17: mod_base = gm
  modified_base 18: mod_base = OTHER; note = 2-fluororibose cytosine
  modified_base 19: mod_base = cm
  modified_base 19..20: mod_base = OTHER; note = phosphorothioate
  modified_base 20: mod_base = um
  modified_base 20..21: mod_base = OTHER; note = phosphorothioate
  modified_base 21: mod_base = um
  source 1..21: mol_type = other RNA
tctgtctccaatacaggcctt

SEQ ID NO: 115 - RNA, 21 nt, synthetic construct
  misc_feature 1..21: note = Synthetic: WV-38341
  misc_feature 1..21: note = Synthetic: SSR-0103635
  modified_base 1: mod_base = OTHER; note = 2-fluororibose uracil
  modified_base 1..2: mod_base = OTHER; note = phosphorothioate
  modified_base 2: mod_base = OTHER; note = 2-fluororibose cytosine
  modified_base 2..3: mod_base = OTHER; note = phosphorothioate
  modified_base 3: mod_base = OTHER; note = 2-O-methylribose adenine
  modified_base 4: mod_base = OTHER; note = 2-fluororibose uracil
  modified_base 5: mod_base = cm
  modified_base 6: mod_base = OTHER; note = 2-fluororibose uracil
  modified_base 7: mod_base = gm
  modified_base 8: mod_base = OTHER; note = 2-fluororibose uracil
  modified_base 9: mod_base = cm
  modified_base 10: mod_base = OTHER; note = 2-fluororibose uracil
  modified_base 11: mod_base = cm
  modified_base 12: mod_base = cm
  modified_base 13: mod_base = OTHER; note = 2-O-methylribose adenine
  modified_base 14: mod_base = OTHER; note = 2-fluororibose adenine
  modified_base 15: mod_base = um
  modified_base 16: mod_base = OTHER; note = 2-fluororibose adenine
  modified_base 17: mod_base = cm
  modified_base 18: mod_base = OTHER; note = 2-fluororibose adenine
  modified_base 19: mod_base = gm
  modified_base 19..20: mod_base = OTHER; note = phosphorothioate
  modified_base 20: mod_base = um
  modified_base 20..21: mod_base = OTHER; note = phosphorothioate
  modified_base 21: mod_base = um
  source 1..21: mol_type = other RNA
tcatctgtctccaatacagtt

SEQ ID NO: 116 - RNA, 21 nt, synthetic construct
  misc_feature 1..21: note = Synthetic: WV-38342
  misc_feature 1..21: note = Synthetic: SSR-0103708
  modified_base 1: mod_base = OTHER; note = 2-fluororibose uracil
  modified_base 1..2: mod_base = OTHER; note = phosphorothioate
  modified_base 2: mod_base = OTHER; note = 2-fluororibose uracil
  modified_base 2..3: mod_base = OTHER; note = phosphorothioate
  modified_base 3: mod_base = cm
  modified_base 4: mod_base = OTHER; note = 2-fluororibose adenine
  modified_base 5: mod_base = um
  modified_base 6: mod_base = OTHER; note = 2-fluororibose cytosine
  modified_base 7: mod_base = um
  modified_base 8: mod_base = OTHER; note = 2-fluororibose guanine
  modified_base 9: mod_base = um
  modified_base 10: mod_base = OTHER; note = 2-fluororibose cytosine
  modified_base 11: mod_base = um
  modified_base 12: mod_base = cm
  modified_base 13: mod_base = cm
  modified_base 14: mod_base = OTHER; note = 2-fluororibose adenine
  modified_base 15: mod_base = OTHER; note = 2-O-methylribose adenine
  modified_base 16: mod_base = OTHER; note = 2-fluororibose uracil
  modified_base 17: mod_base = OTHER; note = 2-O-methylribose adenine
  modified_base 18: mod_base = OTHER; note = 2-fluororibose cytosine
  modified_base 19: mod_base = OTHER; note = 2-O-methylribose adenine
  modified_base 19..20: mod_base = OTHER; note = phosphorothioate
  modified_base 20: mod_base = um
  modified_base 20..21: mod_base = OTHER; note = phosphorothioate
  modified_base 21: mod_base = um
  source 1..21: mol_type = other RNA
ttcatctgtctccaatacatt

SEQ ID NO: 117 - RNA, 21 nt, synthetic construct
  misc_feature 1..21: note = Synthetic: WV-38343
  misc_feature 1..21: note = Synthetic: SSR-0103592
  modified_base 1: mod_base = OTHER; note = 2-fluororibose uracil
  modified_base 1..2: mod_base = OTHER; note = phosphorothioate
  modified_base 2: mod_base = OTHER; note = 2-fluororibose adenine
  modified_base 2..3: mod_base = OTHER; note = phosphorothioate
  modified_base 3: mod_base = cm
  modified_base 4: mod_base = OTHER; note = 2-fluororibose guanine
  modified_base 5: mod_base = OTHER; note = 2-O-methylribose adenine
  modified_base 6: mod_base = OTHER; note = 2-fluororibose cytosine
  modified_base 7: mod_base = um
  modified_base 8: mod_base = OTHER; note = 2-fluororibose uracil
  modified_base 9: mod_base = cm
  modified_base 10: mod_base = OTHER; note = 2-fluororibose adenine
  modified_base 11: mod_base = um
  modified_base 12: mod_base = cm
  modified_base 13: mod_base = um
  modified_base 14: mod_base = OTHER; note = 2-fluororibose guanine
  modified_base 15: mod_base = um
  modified_base 16: mod_base = OTHER; note = 2-fluororibose cytosine
  modified_base 17: mod_base = um
  modified_base 18: mod_base = OTHER; note = 2-fluororibose cytosine
  modified_base 19: mod_base = cm
  modified_base 19..20: mod_base = OTHER; note = phosphorothioate
  modified_base 20: mod_base = um
  modified_base 20..21: mod_base = OTHER; note = phosphorothioate
  modified_base 21: mod_base = um
  source 1..21: mol_type = other RNA
tacgacttcatctgtctcctt

SEQ ID NO: 118 - RNA, 21 nt, synthetic construct
  misc_feature 1..21: note = Synthetic: WV-38344
  misc_feature 1..21: note = Synthetic: SSR-0103697
  modified_base 1: mod_base = OTHER; note = 2-fluororibose uracil
  modified_base 1..2: mod_base = OTHER; note = phosphorothioate
  modified_base 2: mod_base = OTHER; note = 2-fluororibose uracil
  modified_base 2..3: mod_base = OTHER; note = phosphorothioate
  modified_base 3: mod_base = OTHER; note = 2-O-methylribose adenine
  modified_base 4: mod_base = OTHER; note = 2-fluororibose cytosine
  modified_base 5: mod_base = gm
  modified_base 6: mod_base = OTHER; note = 2-fluororibose adenine
  modified_base 7: mod_base = cm
  modified_base 8: mod_base = OTHER; note = 2-fluororibose uracil
  modified_base 9: mod_base = um
  modified_base 10: mod_base = OTHER; note = 2-fluororibose cytosine
  modified_base 11: mod_base = OTHER; note = 2-O-methylribose adenine
  modified_base 12: mod_base = um
  modified_base 13: mod_base = cm
  modified_base 14: mod_base = OTHER; note = 2-fluororibose uracil
  modified_base 15: mod_base = gm
  modified_base 16: mod_base = OTHER; note = 2-fluororibose uracil
  modified_base 17: mod_base = cm
  modified_base 18: mod_base = OTHER; note = 2-fluororibose uracil
  modified_base 19: mod_base = cm
  modified_base 19..20: mod_base = OTHER; note = phosphorothioate
  modified_base 20: mod_base = um
  modified_base 20..21: mod_base = OTHER; note = phosphorothioate
  modified_base 21: mod_base = um
  source 1..21: mol_type = other RNA
ttacgacttcatctgtctctt

SEQ ID NO: 119 - RNA, 21 nt, synthetic construct
  misc_feature 1..21: note = Synthetic: WV-38345
  misc_feature 1..21: note = Synthetic: SSR-0103653
  modified_base 1: mod_base = OTHER; note = 2-fluororibose uracil
  modified_base 1..2: mod_base = OTHER; note = phosphorothioate
  modified_base 2: mod_base = OTHER; note = 2-fluororibose cytosine
  modified_base 2..3: mod_base = OTHER; note = phosphorothioate
  modified_base 3: mod_base = um
  modified_base 4: mod_base = OTHER; note = 2-fluororibose uracil
  modified_base 5: mod_base = OTHER; note = 2-O-methylribose adenine
  modified_base 6: mod_base = OTHER; note = 2-fluororibose cytosine
  modified_base 7: mod_base = gm
  modified_base 8: mod_base = OTHER; note = 2-fluororibose adenine
  modified_base 9: mod_base = cm
  modified_base 10: mod_base = OTHER; note = 2-fluororibose uracil
  modified_base 11: mod_base = um
  modified_base 12: mod_base = cm
  modified_base 13: mod_base = OTHER; note = 2-O-methylribose adenine
  modified_base 14: mod_base = OTHER; note = 2-fluororibose uracil
  modified_base 15: mod_base = cm
  modified_base 16: mod_base = OTHER; note = 2-fluororibose uracil
  modified_base 17: mod_base = gm
  modified_base 18: mod_base = OTHER; note = 2-fluororibose uracil
  modified_base 19: mod_base = cm
  modified_base 19..20: mod_base = OTHER; note = phosphorothioate
  modified_base 20: mod_base = um
  modified_base 20..21: mod_base = OTHER; note = phosphorothioate
  modified_base 21: mod_base = um
  source 1..21: mol_type = other RNA
tcttacgacttcatctgtctt

SEQ ID NO: 120 - RNA, 21 nt, synthetic construct
  misc_feature 1..21: note = Synthetic: WV-38346
  misc_feature 1..21: note = Synthetic: SSR-0103718
  modified_base 1: mod_base = OTHER; note = 2-fluororibose uracil
  modified_base 1..2: mod_base = OTHER; note = phosphorothioate
  modified_base 2: mod_base = OTHER; note = 2-fluororibose uracil
  modified_base 2..3: mod_base = OTHER; note = phosphorothioate
  modified_base 3: mod_base = cm
  modified_base 4: mod_base = OTHER; note = 2-fluororibose uracil
  modified_base 5: mod_base = um
  modified_base 6: mod_base = OTHER; note = 2-fluororibose adenine
  modified_base 7: mod_base = cm
  modified_base 8: mod_base = OTHER; note = 2-fluororibose guanine
  modified_base 9: mod_base = OTHER; note = 2-O-methylribose adenine
  modified_base 10: mod_base = OTHER; note = 2-fluororibose cytosine
  modified_base 11: mod_base = um
  modified_base 12: mod_base = um
  modified_base 13: mod_base = cm
  modified_base 14: mod_base = OTHER; note = 2-fluororibose adenine
  modified_base 15: mod_base = um
  modified_base 16: mod_base = OTHER; note = 2-fluororibose cytosine
  modified_base 17: mod_base = um
  modified_base 18: mod_base = OTHER; note = 2-fluororibose guanine
  modified_base 19: mod_base = um
  modified_base 19..20: mod_base = OTHER; note = phosphorothioate
  modified_base 20: mod_base = um
  modified_base 20..21: mod_base = OTHER; note = phosphorothioate
  modified_base 21: mod_base = um
  source 1..21: mol_type = other RNA
ttcttacgacttcatctgttt

SEQ ID NO: 121 - RNA, 21 nt, synthetic construct
  misc_feature 1..21: note = Synthetic: WV-38347
  misc_feature 1..21: note = Synthetic: SSR-0103656
  modified_base 1: mod_base = OTHER; note = 2-fluororibose uracil
  modified_base 1..2: mod_base = OTHER; note = phosphorothioate
  modified_base 2: mod_base = OTHER; note = 2-fluororibose cytosine
  modified_base 2..3: mod_base = OTHER; note = phosphorothioate
  modified_base 3: mod_base = um
  modified_base 4: mod_base = OTHER; note = 2-fluororibose uracil
  modified_base 5: mod_base = cm
  modified_base 6: mod_base = OTHER; note = 2-fluororibose uracil
  modified_base 7: mod_base = um
  modified_base 8: mod_base = OTHER; note = 2-fluororibose adenine
  modified_base 9: mod_base = cm
  modified_base 10: mod_base = OTHER; note = 2-fluororibose guanine
  modified_base 11: mod_base = OTHER; note = 2-O-methylribose adenine
  modified_base 12: mod_base = cm
  modified_base 13: mod_base = um
  modified_base 14: mod_base = OTHER; note = 2-fluororibose uracil
  modified_base 15: mod_base = cm
  modified_base 16: mod_base = OTHER; note = 2-fluororibose adenine
  modified_base 17: mod_base = um
  modified_base 18: mod_base = OTHER; note = 2-fluororibose cytosine
  modified_base 19: mod_base = um
  modified_base 19..20: mod_base = OTHER; note = phosphorothioate
  modified_base 20: mod_base = um
  modified_base 20..21: mod_base = OTHER; note = phosphorothioate
  modified_base 21: mod_base = um
  source 1..21: mol_type = other RNA
tcttcttacgacttcatcttt

SEQ ID NO: 122 - RNA, 21 nt, synthetic construct
  misc_feature 1..21: note = Synthetic: WV-38348
  misc_feature 1..21: note = Synthetic: SSR-0103633
  modified_base 1: mod_base = OTHER; note = 2-fluororibose uracil
  modified_base 1..2: mod_base = OTHER; note = phosphorothioate
  modified_base 2: mod_base = OTHER; note = 2-fluororibose cytosine
  modified_base 2..3: mod_base = OTHER; note = phosphorothioate
  modified_base 3: mod_base = OTHER; note = 2-O-methylribose adenine
  modified_base 4: mod_base = OTHER; note = 2-fluororibose guanine
  modified_base 5: mod_base = OTHER; note = 2-O-methylribose adenine
  modified_base 6: mod_base = OTHER; note = 2-fluororibose cytosine
  modified_base 7: mod_base = um
  modified_base 8: mod_base = OTHER; note = 2-fluororibose uracil
  modified_base 9: mod_base = cm
  modified_base 10: mod_base = OTHER; note = 2-fluororibose uracil
  modified_base 11: mod_base = um
  modified_base 12: mod_base = OTHER; note = 2-O-methylribose adenine
  modified_base 13: mod_base = cm
  modified_base 14: mod_base = OTHER; note = 2-fluororibose guanine
  modified_base 15: mod_base = OTHER; note = 2-O-methylribose adenine
  modified_base 16: mod_base = OTHER; note = 2-fluororibose cytosine
  modified_base 17: mod_base = um
  modified_base 18: mod_base = OTHER; note = 2-fluororibose uracil
  modified_base 19: mod_base = cm
  modified_base 19..20: mod_base = OTHER; note = phosphorothioate
  modified_base 20: mod_base = um
  modified_base 20..21: mod_base = OTHER; note = phosphorothioate
  modified_base 21: mod_base = um
  source 1..21: mol_type = other RNA
tcagacttcttacgacttctt

SEQ ID NO: 123 - RNA, 21 nt, synthetic construct
  misc_feature 1..21: note = Synthetic: WV-38349
  misc_feature 1..21: note = Synthetic: SSR-0103617
  modified_base 1: mod_base = OTHER; note = 2-fluororibose uracil
  modified_base 1..2: mod_base = OTHER; note = phosphorothioate
  modified_base 2: mod_base = OTHER; note = 2-fluororibose adenine
  modified_base 2..3: mod_base = OTHER; note = phosphorothioate
  modified_base 3: mod_base = um
  modified_base 4: mod_base = OTHER; note = 2-fluororibose cytosine
  modified_base 5: mod_base = OTHER; note = 2-O-methylribose adenine
  modified_base 6: mod_base = OTHER; note = 2-fluororibose guanine
  modified_base 7: mod_base = OTHER; note = 2-O-methylribose adenine
  modified_base 8: mod_base = OTHER; note = 2-fluororibose cytosine
  modified_base 9: mod_base = um
  modified_base 10: mod_base = OTHER; note = 2-fluororibose uracil
  modified_base 11: mod_base = cm
  modified_base 12: mod_base = um
  modified_base 13: mod_base = um
  modified_base 14: mod_base = OTHER; note = 2-fluororibose adenine
  modified_base 15: mod_base = cm
  modified_base 16: mod_base = OTHER; note = 2-fluororibose guanine
  modified_base 17: mod_base = OTHER; note = 2-O-methylribose adenine
  modified_base 18: mod_base = OTHER; note = 2-fluororibose cytosine
  modified_base 19: mod_base = um
  modified_base 19..20: mod_base = OTHER; note = phosphorothioate
  modified_base 20: mod_base = um
  modified_base 20..21: mod_base = OTHER; note = phosphorothioate
  modified_base 21: mod_base = um
  source 1..21: mol_type = other RNA
tatcagacttcttacgacttt

SEQ ID NO: 124 - RNA, 21 nt, synthetic construct
  misc_feature 1..21: note = Synthetic: WV-38350
  misc_feature 1..21: note = Synthetic: SSR-0103714
  modified_base 1: mod_base = OTHER; note = 2-fluororibose uracil
  modified_base 1..2: mod_base = OTHER; note = phosphorothioate
  modified_base 2: mod_base = OTHER; note = 2-fluororibose uracil
  modified_base 2..3: mod_base = OTHER; note = phosphorothioate
  modified_base 3: mod_base = cm
  modified_base 4: mod_base = OTHER; note = 2-fluororibose uracil
  modified_base 5: mod_base = OTHER; note = 2-O-methylribose adenine
  modified_base 6: mod_base = OTHER; note = 2-fluororibose uracil
  modified_base 7: mod_base = cm
  modified_base 8: mod_base = OTHER; note = 2-fluororibose adenine
  modified_base 9: mod_base = gm
  modified_base 10: mod_base = OTHER; note = 2-fluororibose adenine
  modified_base 11: mod_base = cm
  modified_base 12: mod_base = um
  modified_base 13: mod_base = um
  modified_base 14: mod_base = OTHER; note = 2-fluororibose cytosine
  modified_base 15: mod_base = um
  modified_base 16: mod_base = OTHER; note = 2-fluororibose uracil
  modified_base 17: mod_base = OTHER; note = 2-O-methylribose adenine
  modified_base 18: mod_base = OTHER; note = 2-fluororibose cytosine
  modified_base 19: mod_base = gm
  modified_base 19..20: mod_base = OTHER; note = phosphorothioate
  modified_base 20: mod_base = um
  modified_base 20..21: mod_base = OTHER; note = phosphorothioate
  modified_base 21: mod_base = um
  source 1..21: mol_type = other RNA
ttctatcagacttcttacgtt

SEQ ID NO: 125 - RNA, 21 nt, synthetic construct
  misc_feature 1..21: note = Synthetic: WV-38351
  misc_feature 1..21: note = Synthetic: SSR-0103643
  modified_base 1: mod_base = OTHER; note = 2-fluororibose uracil
  modified_base 1..2: mod_base = OTHER; note = phosphorothioate
  modified_base 2: mod_base = OTHER; note = 2-fluororibose cytosine
  modified_base 2..3: mod_base = OTHER; note = phosphorothioate
  modified_base 3: mod_base = cm
  modified_base 4: mod_base = OTHER; note = 2-fluororibose adenine
  modified_base 5: mod_base = um
  modified_base 6: mod_base = OTHER; note = 2-fluororibose cytosine
  modified_base 7: mod_base = um
  modified_base 8: mod_base = OTHER; note = 2-fluororibose adenine
  modified_base 9: mod_base = um
  modified_base 10: mod_base = OTHER; note = 2-fluororibose cytosine
  modified_base 11: mod_base = OTHER; note = 2-O-methylribose adenine
  modified_base 12: mod_base = gm
  modified_base 13: mod_base = OTHER; note = 2-O-methylribose adenine
  modified_base 14: mod_base = OTHER; note = 2-fluororibose cytosine
  modified_base 15: mod_base = um
  modified_base 16: mod_base = OTHER; note = 2-fluororibose uracil
  modified_base 17: mod_base = cm
  modified_base 18: mod_base = OTHER; note = 2-fluororibose uracil
  modified_base 19: mod_base = um
  modified_base 19..20: mod_base = OTHER; note = phosphorothioate
  modified_base 20: mod_base = um
  modified_base 20..21: mod_base = OTHER; note = phosphorothioate
  modified_base 21: mod_base = um
  source 1..21: mol_type = other RNA
tccatctatcagacttctttt

SEQ ID NO: 126 - RNA, 21 nt, synthetic construct
  misc_feature 1..21: note = Synthetic: WV-38352
  misc_feature 1..21: note = Synthetic: SSR-0103710
  modified_base 1: mod_base = OTHER; note = 2-fluororibose uracil
  modified_base 1..2: mod_base = OTHER; note = phosphorothioate
  modified_base 2: mod_base = OTHER; note = 2-fluororibose uracil
  modified_base 2..3: mod_base = OTHER; note = phosphorothioate
  modified_base 3: mod_base = cm
  modified_base 4: mod_base = OTHER; note = 2-fluororibose cytosine
  modified_base 5: mod_base = OTHER; note = 2-O-methylribose adenine
  modified_base 6: mod_base = OTHER; note = 2-fluororibose uracil
  modified_base 7: mod_base = cm
  modified_base 8: mod_base = OTHER; note = 2-fluororibose uracil
  modified_base 9: mod_base = OTHER; note = 2-O-methylribose adenine
  modified_base 10: mod_base = OTHER; note = 2-fluororibose uracil
  modified_base 11: mod_base = cm
  modified_base 12: mod_base = OTHER; note = 2-O-methylribose adenine
  modified_base 13: mod_base = gm
  modified_base 14: mod_base = OTHER; note = 2-fluororibose adenine
  modified_base 15: mod_base = cm
  modified_base 16: mod_base = OTHER; note = 2-fluororibose uracil
  modified_base 17: mod_base = um
  modified_base 18: mod_base = OTHER; note = 2-fluororibose cytosine
  modified_base 19: mod_base = um
  modified_base 19..20: mod_base = OTHER; note = phosphorothioate
  modified_base 20: mod_base = um
  modified_base 20..21: mod_base = OTHER; note = phosphorothioate
  modified_base 21: mod_base = um
  source 1..21: mol_type = other RNA
ttccatctatcagacttcttt

SEQ ID NO: 127 - RNA, 21 nt, synthetic construct
  misc_feature 1..21: note = Synthetic: WV-38353
  misc_feature 1..21: note = Synthetic: SSR-0103741
  modified_base 1: mod_base = OTHER; note = 2-fluororibose uracil
  modified_base 1..2: mod_base = OTHER; note = phosphorothioate
  modified_base 2: mod_base = OTHER; note = 2-fluororibose uracil
  modified_base 2..3: mod_base = OTHER; note = phosphorothioate
  modified_base 3: mod_base = um
  modified_base 4: mod_base = OTHER; note = 2-fluororibose cytosine
  modified_base 5: mod_base = cm
  modified_base 6: mod_base = OTHER; note = 2-fluororibose adenine
  modified_base 7: mod_base = um
  modified_base 8: mod_base = OTHER; note = 2-fluororibose cytosine
  modified_base 9: mod_base = um
  modified_base 10: mod_base = OTHER; note = 2-fluororibose adenine
  modified_base 11: mod_base = um
  modified_base 12: mod_base = cm
  modified_base 13: mod_base = OTHER; note = 2-O-methylribose adenine
  modified_base 14: mod_base = OTHER; note = 2-fluororibose guanine
  modified_base 15: mod_base = OTHER; note = 2-O-methylribose adenine
  modified_base 16: mod_base = OTHER; note = 2-fluororibose cytosine
  modified_base 17: mod_base = um
  modified_base 18: mod_base = OTHER; note = 2-fluororibose uracil
  modified_base 19: mod_base = cm
  modified_base 19..20: mod_base = OTHER; note = phosphorothioate
  modified_base 20: mod_base = um
  modified_base 20..21: mod_base = OTHER; note = phosphorothioate
  modified_base 21: mod_base = um
  source 1..21: mol_type = other RNA
tttccatctatcagacttctt

SEQ ID NO: 128 - RNA, 21 nt, synthetic construct
  misc_feature 1..21: note = Synthetic: WV-38354
  misc_feature 1..21: note = Synthetic: SSR-0103625
  modified_base 1: mod_base = OTHER; note = 2-fluororibose uracil
  modified_base 1..2: mod_base = OTHER; note = phosphorothioate
  modified_base 2: mod_base = OTHER; note = 2-fluororibose adenine
  modified_base 2..3: mod_base = OTHER; note = phosphorothioate
  modified_base 3: mod_base = um
  modified_base 4: mod_base = OTHER; note = 2-fluororibose uracil
  modified_base 5: mod_base = cm
  modified_base 6: mod_base = OTHER; note = 2-fluororibose cytosine
  modified_base 7: mod_base = OTHER; note = 2-O-methylribose adenine
  modified_base 8: mod_base = OTHER; note = 2-fluororibose uracil
  modified_base 9: mod_base = cm
  modified_base 10: mod_base = OTHER; note = 2-fluororibose uracil
  modified_base 11: mod_base = OTHER; note = 2-O-methylribose adenine
  modified_base 12: mod_base = um
  modified_base 13: mod_base = cm
  modified_base 14: mod_base = OTHER; note = 2-fluororibose adenine
  modified_base 15: mod_base = gm
  modified_base 16: mod_base = OTHER; note = 2-fluororibose adenine
  modified_base 17: mod_base = cm
  modified_base 18: mod_base = OTHER; note = 2-fluororibose uracil
  modified_base 19: mod_base = um
  modified_base 19..20: mod_base = OTHER; note = phosphorothioate
  modified_base 20: mod_base = um
  modified_base 20..21: mod_base = OTHER; note = phosphorothioate
  modified_base 21: mod_base = um
  source 1..21: mol_type = other RNA
tattccatctatcagactttt

SEQ ID NO: 129 - RNA, 21 nt, synthetic construct
  misc_feature 1..21: note = Synthetic: WV-38355
  misc_feature 1..21: note = Synthetic: SSR-0103610
  modified_base 1: mod_base = OTHER; note = 2-fluororibose uracil
  modified_base 1..2: mod_base = OTHER; note = phosphorothioate
  modified_base 2: mod_base = OTHER; note = 2-fluororibose adenine
  modified_base 2..3: mod_base = OTHER; note = phosphorothioate
  modified_base 3: mod_base = gm
  modified_base 4: mod_base = OTHER; note = 2-fluororibose uracil
  modified_base 5: mod_base = OTHER; note = 2-O-methylribose adenine
  modified_base 6: mod_base = OTHER; note = 2-fluororibose uracil
  modified_base 7: mod_base = um
  modified_base 8: mod_base = OTHER; note = 2-fluororibose cytosine
  modified_base 9: mod_base = cm
  modified_base 10: mod_base = OTHER; note = 2-fluororibose adenine
  modified_base 11: mod_base = um
  modified_base 12: mod_base = cm
  modified_base 13: mod_base = um
  modified_base 14: mod_base = OTHER; note = 2-fluororibose adenine
  modified_base 15: mod_base = um
  modified_base 16: mod_base = OTHER; note = 2-fluororibose cytosine
  modified_base 17: mod_base = OTHER; note = 2-O-methylribose adenine
  modified_base 18: mod_base = OTHER; note = 2-fluororibose guanine
  modified_base 19: mod_base = OTHER; note = 2-O-methylribose adenine
  modified_base 19..20: mod_base = OTHER; note = phosphorothioate
  modified_base 20: mod_base = um
  modified_base 20..21: mod_base = OTHER; note = phosphorothioate
  modified_base 21: mod_base = um
  source 1..21: mol_type = other RNA
tagtattccatctatcagatt

SEQ ID NO: 130 - RNA, 21 nt, synthetic construct
  misc_feature 1..21: note = Synthetic: WV-38356
  misc_feature 1..21: note = Synthetic: SSR-0103580
  modified_base 1: mod_base = OTHER; note = 2-fluororibose uracil
  modified_base 1..2: mod_base = OTHER; note = phosphorothioate
  modified_base 2: mod_base = OTHER; note = 2-fluororibose adenine
  modified_base 2..3: mod_base = OTHER; note = phosphorothioate
  modified_base 3: mod_base = OTHER; note = 2-O-methylribose adenine
  modified_base 4: mod_base = OTHER; note = 2-fluororibose guanine
  modified_base 5: mod_base = um
  modified_base 6: mod_base = OTHER; note = 2-fluororibose adenine
  modified_base 7: mod_base = um
  modified_base 8: mod_base = OTHER; note = 2-fluororibose uracil
  modified_base 9: mod_base = cm
  modified_base 10: mod_base = OTHER; note = 2-fluororibose cytosine
  modified_base 11: mod_base = OTHER; note = 2-O-methylribose adenine
  modified_base 12: mod_base = um
  modified_base 13: mod_base = cm
  modified_base 14: mod_base = OTHER; note = 2-fluororibose uracil
  modified_base 15: mod_base = OTHER; note = 2-O-methylribose adenine
  modified_base 16: mod_base = OTHER; note = 2-fluororibose uracil
  modified_base 17: mod_base = cm
  modified_base 18: mod_base = OTHER; note = 2-fluororibose adenine
  modified_base 19: mod_base = gm
  modified_base 19..20: mod_base = OTHER; note = phosphorothioate
  modified_base 20: mod_base = um
  modified_base 20..21: mod_base = OTHER; note = phosphorothioate
  modified_base 21: mod_base = um
  source 1..21: mol_type = other RNA
taagtattccatctatcagtt

SEQ ID NO: 131 - RNA, 21 nt, synthetic construct
  misc_feature 1..21: note = Synthetic: WV-38357
  misc_feature 1..21: note = Synthetic: SSR-0103732
  modified_base 1: mod_base = OTHER; note = 2-fluororibose uracil
  modified_base 1..2: mod_base = OTHER; note = phosphorothioate
  modified_base 2: mod_base = OTHER; note = 2-fluororibose uracil
  modified_base 2..3: mod_base = OTHER; note = phosphorothioate
  modified_base 3: mod_base = gm
  modified_base 4: mod_base = OTHER; note = 2-fluororibose guanine
  modified_base 5: mod_base = um
  modified_base 6: mod_base = OTHER; note = 2-fluororibose adenine
  modified_base 7: mod_base = OTHER; note = 2-O-methylribose adenine
  modified_base 8: mod_base = OTHER; note = 2-fluororibose guanine
  modified_base 9: mod_base = um
  modified_base 10: mod_base = OTHER; note = 2-fluororibose adenine
  modified_base 11: mod_base = um
  modified_base 12: mod_base = um
  modified_base 13: mod_base = cm
  modified_base 14: mod_base = OTHER; note = 2-fluororibose cytosine
  modified_base 15: mod_base = OTHER; note = 2-O-methylribose adenine
  modified_base 16: mod_base = OTHER; note = 2-fluororibose uracil
  modified_base 17: mod_base = cm
  modified_base 18: mod_base = OTHER; note = 2-fluororibose uracil
  modified_base 19: mod_base = OTHER; note = 2-O-methylribose adenine
  modified_base 19..20: mod_base = OTHER; note = phosphorothioate
  modified_base 20: mod_base = um
  modified_base 20..21: mod_base = OTHER; note = phosphorothioate
  modified_base 21: mod_base = um
  source 1..21: mol_type = other RNA
ttggtaagtattccatctatt

SEQ ID NO: 132 - RNA, 21 nt, synthetic construct
  misc_feature 1..21: note = Synthetic: WV-38358
  misc_feature 1..21: note = Synthetic: SSR-0103751
  modified_base 1: mod_base = OTHER; note = 2-fluororibose uracil
  modified_base 1..2: mod_base = OTHER; note = phosphorothioate
  modified_base 2: mod_base = OTHER; note = 2-fluororibose uracil
  modified_base 2..3: mod_base = OTHER; note = phosphorothioate
  modified_base 3: mod_base = um
  modified_base 4: mod_base = OTHER; note = 2-fluororibose guanine
  modified_base 5: mod_base = gm
  modified_base 6: mod_base = OTHER; note = 2-fluororibose uracil
  modified_base 7: mod_base = OTHER; note = 2-O-methylribose adenine
  modified_base 8: mod_base = OTHER; note = 2-fluororibose adenine
  modified_base 9: mod_base = gm
  modified_base 10: mod_base = OTHER; note = 2-fluororibose uracil
  modified_base 11: mod_base = OTHER; note = 2-O-methylribose adenine
  modified_base 12: mod_base = um
  modified_base 13: mod_base = um
  modified_base 14: mod_base = OTHER; note = 2-fluororibose cytosine
  modified_base 15: mod_base = cm
  modified_base 16: mod_base = OTHER; note = 2-fluororibose adenine
  modified_base 17: mod_base = um
  modified_base 18: mod_base = OTHER; note = 2-fluororibose cytosine
  modified_base 19: mod_base = um
  modified_base 19..20: mod_base = OTHER; note = phosphorothioate
  modified_base 20: mod_base = um
  modified_base 20..21: mod_base = OTHER; note = phosphorothioate
  modified_base 21: mod_base = um
  source 1..21: mol_type = other RNA
tttggtaagtattccatcttt

SEQ ID NO: 133 - RNA, 21 nt, synthetic construct
  misc_feature 1..21: note = Synthetic: WV-38359
  misc_feature 1..21: note = Synthetic: SSR-0103626
  modified_base 1: mod_base = OTHER; note = 2-fluororibose uracil
  modified_base 1..2: mod_base = OTHER; note = phosphorothioate
  modified_base 2: mod_base = OTHER; note = 2-fluororibose adenine
  modified_base 2..3: mod_base = OTHER; note = phosphorothioate
  modified_base 3: mod_base = um
  modified_base 4: mod_base = OTHER; note = 2-fluororibose uracil
  modified_base 5: mod_base = gm
  modified_base 6: mod_base = OTHER; note = 2-fluororibose guanine
  modified_base 7: mod_base = um
  modified_base 8: mod_base = OTHER; note = 2-fluororibose adenine
  modified_base 9: mod_base = OTHER; note = 2-O-methylribose adenine
  modified_base 10: mod_base = OTHER; note = 2-fluororibose guanine
  modified_base 11: mod_base = um
  modified_base 12: mod_base = OTHER; note = 2-O-methylribose adenine
  modified_base 13: mod_base = um
  modified_base 14: mod_base = OTHER; note = 2-fluororibose uracil
  modified_base 15: mod_base = cm
  modified_base 16: mod_base = OTHER; note = 2-fluororibose cytosine
  modified_base 17: mod_base = OTHER; note = 2-O-methylribose adenine
  modified_base 18: mod_base = OTHER; note = 2-fluororibose uracil
  modified_base 19: mod_base = cm
  modified_base 19..20: mod_base = OTHER; note = phosphorothioate
  modified_base 20: mod_base = um
  modified_base 20..21: mod_base = OTHER; note = phosphorothioate
  modified_base 21: mod_base = um
  source 1..21: mol_type = other RNA
tattggtaagtattccatctt

SEQ ID NO: 134 - RNA, 21 nt, synthetic construct
  misc_feature 1..21: note = Synthetic: WV-38360
  misc_feature 1..21: note = Synthetic: SSR-0103705
  modified_base 1: mod_base = OTHER; note = 2-fluororibose uracil
  modified_base 1..2: mod_base = OTHER; note = phosphorothioate
  modified_base 2: mod_base = OTHER; note = 2-fluororibose uracil
  modified_base 2..3: mod_base = OTHER; note = phosphorothioate
  modified_base 3: mod_base = OTHER; note = 2-O-methylribose adenine
  modified_base 4: mod_base = OTHER; note = 2-fluororibose uracil
  modified_base 5: mod_base = um
  modified_base 6: mod_base = OTHER; note = 2-fluororibose guanine
  modified_base 7: mod_base = gm
  modified_base 8: mod_base = OTHER; note = 2-fluororibose uracil
  modified_base 9: mod_base = OTHER; note = 2-O-methylribose adenine
  modified_base 10: mod_base = OTHER; note = 2-fluororibose adenine
  modified_base 11: mod_base = gm
  modified_base 12: mod_base = um
  modified_base 13: mod_base = OTHER; note = 2-O-methylribose adenine
  modified_base 14: mod_base = OTHER; note = 2-fluororibose uracil
  modified_base 15: mod_base = um
  modified_base 16: mod_base = OTHER; note = 2-fluororibose cytosine
  modified_base 17: mod_base = cm
  modified_base 18: mod_base = OTHER; note = 2-fluororibose adenine
  modified_base 19: mod_base = um
  modified_base 19..20: mod_base = OTHER; note = phosphorothioate
  modified_base 20: mod_base = um
  modified_base 20..21: mod_base = OTHER; note = phosphorothioate
  modified_base 21: mod_base = um
  source 1..21: mol_type = other RNA
ttattggtaagtattccattt

SEQ ID NO: 135 - RNA, 21 nt, synthetic construct
  misc_feature 1..21: note = Synthetic: WV-38361
  misc_feature 1..21: note = Synthetic: SSR-0103654
  modified_base 1: mod_base = OTHER; note = 2-fluororibose uracil
  modified_base 1..2: mod_base = OTHER; note = phosphorothioate
  modified_base 2: mod_base = OTHER; note = 2-fluororibose cytosine
  modified_base 2..3: mod_base = OTHER; note = phosphorothioate
  modified_base 3: mod_base = um
  modified_base 4: mod_base = OTHER; note = 2-fluororibose uracil
  modified_base 5: mod_base = OTHER; note = 2-O-methylribose adenine
  modified_base 6: mod_base = OTHER; note = 2-fluororibose uracil
  modified_base 7: mod_base = um
  modified_base 8: mod_base = OTHER; note = 2-fluororibose guanine
  modified_base 9: mod_base = gm
  modified_base 10: mod_base = OTHER; note = 2-fluororibose uracil
  modified_base 11: mod_base = OTHER; note = 2-O-methylribose adenine
  modified_base 12: mod_base = OTHER; note = 2-O-methylribose adenine
  modified_base 13: mod_base = gm
  modified_base 14: mod_base = OTHER; note = 2-fluororibose uracil
  modified_base 15: mod_base = OTHER; note = 2-O-methylribose adenine
  modified_base 16: mod_base = OTHER; note = 2-fluororibose uracil
  modified_base 17: mod_base = um
  modified_base 18: mod_base = OTHER; note = 2-fluororibose cytosine
  modified_base 19: mod_base = cm
  modified_base 19..20: mod_base = OTHER; note = phosphorothioate
  modified_base 20: mod_base = um
  modified_base 20..21: mod_base = OTHER; note = phosphorothioate
  modified_base 21: mod_base = um
  source 1..21: mol_type = other RNA
tcttattggtaagtattcctt

SEQ ID NO: 136 - RNA, 21 nt, synthetic construct
  misc_feature 1..21: note = Synthetic: WV-38362
  misc_feature 1..21: note = Synthetic: SSR-0103719
  modified_base 1: mod_base = OTHER; note = 2-fluororibose uracil
  modified_base 1..2: mod_base = OTHER; note = phosphorothioate
  modified_base 2: mod_base = OTHER; note = 2-fluororibose uracil
  modified_base 2..3: mod_base = OTHER; note = phosphorothioate
  modified_base 3: mod_base = cm
  modified_base 4: mod_base = OTHER; note = 2-fluororibose uracil
  modified_base 5: mod_base = um
  modified_base 6: mod_base = OTHER; note = 2-fluororibose adenine
  modified_base 7: mod_base = um
  modified_base 8: mod_base = OTHER; note = 2-fluororibose uracil
  modified_base 9: mod_base = gm
  modified_base 10: mod_base = OTHER; note = 2-fluororibose guanine
  modified_base 11: mod_base = um
  modified_base 12: mod_base = OTHER; note = 2-O-methylribose adenine
  modified_base 13: mod_base = OTHER; note = 2-O-methylribose adenine
  modified_base 14: mod_base = OTHER; note = 2-fluororibose guanine
  modified_base 15: mod_base = um
  modified_base 16: mod_base = OTHER; note = 2-fluororibose adenine
  modified_base 17: mod_base = um
  modified_base 18: mod_base = OTHER; note = 2-fluororibose uracil
  modified_base 19: mod_base = cm
  modified_base 19..20: mod_base = OTHER; note = phosphorothioate
  modified_base 20: mod_base = um
  modified_base 20..21: mod_base = OTHER; note = phosphorothioate
  modified_base 21: mod_base = um
  source 1..21: mol_type = other RNA
ttcttattggtaagtattctt

SEQ ID NO: 137 - RNA, 21 nt, synthetic construct
  misc_feature 1..21: note = Synthetic: WV-38363
  misc_feature 1..21: note = Synthetic: SSR-0103744
  modified_base 1: mod_base = OTHER; note = 2-fluororibose uracil
  modified_base 1..2: mod_base = OTHER; note = phosphorothioate
  modified_base 2: mod_base = OTHER; note = 2-fluororibose uracil
  modified_base 2..3: mod_base = OTHER; note = phosphorothioate
  modified_base 3: mod_base = um
  modified_base 4: mod_base = OTHER; note = 2-fluororibose cytosine
  modified_base 5: mod_base = um
  modified_base 6: mod_base = OTHER; note = 2-fluororibose uracil
  modified_base 7: mod_base = OTHER; note = 2-O-methylribose adenine
  modified_base 8: mod_base = OTHER; note = 2-fluororibose uracil
  modified_base 9: mod_base = um
  modified_base 10: mod_base = OTHER; note = 2-fluororibose guanine
  modified_base 11: mod_base = gm
  modified_base 12: mod_base = um
  modified_base 13: mod_base = OTHER; note = 2-O-methylribose adenine
  modified_base 14: mod_base = OTHER; note = 2-fluororibose adenine
  modified_base 15: mod_base = gm
  modified_base 16: mod_base = OTHER; note = 2-fluororibose uracil
  modified_base 17: mod_base = OTHER; note = 2-O-methylribose adenine
  modified_base 18: mod_base = OTHER; note = 2-fluororibose uracil
  modified_base 19: mod_base = um
  modified_base 19..20: mod_base = OTHER; note = phosphorothioate
  modified_base 20: mod_base = um
  modified_base 20..21: mod_base = OTHER; note = phosphorothioate
  modified_base 21: mod_base = um
  source 1..21: mol_type = other RNA
tttcttattggtaagtatttt

SEQ ID NO: 138 - RNA, 21 nt, synthetic construct
  misc_feature 1..21: note = Synthetic: WV-38364
  misc_feature 1..21: note = Synthetic: SSR-0103577
  modified_base 1: mod_base = OTHER; note = 2-fluororibose uracil
  modified_base 1..2: mod_base = OTHER; note = phosphorothioate
  modified_base 2: mod_base = OTHER; note = 2-fluororibose adenine
  modified_base 2..3: mod_base = OTHER; note = phosphorothioate
  modified_base 3: mod_base = OTHER; note = 2-O-methylribose adenine
  modified_base 4: mod_base = OTHER; note = 2-fluororibose adenine
  modified_base 5: mod_base = um
  modified_base 6: mod_base = OTHER; note = 2-fluororibose cytosine
  modified_base 7: mod_base = OTHER; note = 2-O-methylribose adenine
  modified_base 8: mod_base = OTHER; note = 2-fluororibose uracil
  modified_base 9: mod_base = um
  modified_base 10: mod_base = OTHER; note = 2-fluororibose uracil
  modified_base 11: mod_base = um
  modified_base 12: mod_base = cm
  modified_base 13: mod_base = um
  modified_base 14: mod_base = OTHER; note = 2-fluororibose uracil
  modified_base 15: mod_base = OTHER; note = 2-O-methylribose adenine
  modified_base 16: mod_base = OTHER; note = 2-fluororibose uracil
  modified_base 17: mod_base = um
  modified_base 18: mod_base = OTHER; note = 2-fluororibose guanine
  modified_base 19: mod_base = gm
  modified_base 19..20: mod_base = OTHER; note = phosphorothioate
  modified_base 20: mod_base = um
  modified_base 20..21: mod_base = OTHER; note = phosphorothioate
  modified_base 21: mod_base = um
  source 1..21: mol_type = other RNA
taaatcattttcttattggtt

SEQ ID NO: 139 - RNA, 21 nt, synthetic construct
  misc_feature 1..21: note = Synthetic: WV-38365
  misc_feature 1..21: note = Synthetic: SSR-0103575
  modified_base 1: mod_base = OTHER; note = 2-fluororibose uracil
  modified_base 1..2: mod_base = OTHER; note = phosphorothioate
  modified_base 2: mod_base = OTHER; note = 2-fluororibose adenine
  modified_base 2..3: mod_base = OTHER; note = phosphorothioate
  modified_base 3: mod_base = OTHER; note = 2-O-methylribose adenine
  modified_base 4: mod_base = OTHER; note = 2-fluororibose adenine
  modified_base 5: mod_base = OTHER; note = 2-O-methylribose adenine
  modified_base 6: mod_base = OTHER; note = 2-fluororibose uracil
  modified_base 7: mod_base = cm
  modified_base 8: mod_base = OTHER; note = 2-fluororibose adenine
  modified_base 9: mod_base = um
  modified_base 10: mod_base = OTHER; note = 2-fluororibose uracil
  modified_base 11: mod_base = um
  modified_base 12: mod_base = um
  modified_base 13: mod_base = cm
  modified_base 14: mod_base = OTHER; note = 2-fluororibose uracil
  modified_base 15: mod_base = um
  modified_base 16: mod_base = OTHER; note = 2-fluororibose adenine
  modified_base 17: mod_base = um
  modified_base 18: mod_base = OTHER; note = 2-fluororibose uracil
  modified_base 19: mod_base = gm
  modified_base 19..20: mod_base = OTHER; note = phosphorothioate
  modified_base 20: mod_base = um
  modified_base 20..21: mod_base = OTHER; note = phosphorothioate
  modified_base 21: mod_base = um
  source 1..21: mol_type = other RNA
taaaatcattttcttattgtt

SEQ ID NO: 140 - RNA, 21 nt, synthetic construct
  misc_feature 1..21: note = Synthetic: WV-38366
  misc_feature 1..21: note = Synthetic: SSR-0103676
  modified_base 1: mod_base = OTHER; note = 2-fluororibose uracil
  modified_base 1..2: mod_base = OTHER; note = phosphorothioate
  modified_base 2: mod_base = OTHER; note = 2-fluororibose guanine
  modified_base 2..3: mod_base = OTHER; note = phosphorothioate
  modified_base 3: mod_base = gm
  modified_base 4: mod_base = OTHER; note = 2-fluororibose adenine
  modified_base 5: mod_base = OTHER; note = 2-O-methylribose adenine
  modified_base 6: mod_base = OTHER; note = 2-fluororibose cytosine
  modified_base 7: mod_base = OTHER; note = 2-O-methylribose adenine
  modified_base 8: mod_base = OTHER; note = 2-fluororibose adenine
  modified_base 9: mod_base = OTHER; note = 2-O-methylribose adenine
  modified_base 10: mod_base = OTHER; note = 2-fluororibose adenine
  modified_base 11: mod_base = OTHER; note = 2-O-methylribose adenine
  modified_base 12: mod_base = um
  modified_base 13: mod_base = cm
  modified_base 14: mod_base = OTHER; note = 2-fluororibose adenine
  modified_base 15: mod_base = um
  modified_base 16: mod_base = OTHER; note = 2-fluororibose uracil
  modified_base 17: mod_base = um
  modified_base 18: mod_base = OTHER; note = 2-fluororibose uracil
  modified_base 19: mod_base = cm
  modified_base 19..20: mod_base = OTHER; note = phosphorothioate
  modified_base 20: mod_base = um
  modified_base 20..21: mod_base = OTHER; note = phosphorothioate
  modified_base 21: mod_base = um
  source 1..21: mol_type = other RNA
tggaacaaaaatcattttctt

SEQ ID NO: 141 - RNA, 21 nt, synthetic construct
  misc_feature 1..21: note = Synthetic: WV-38367
  misc_feature 1..21: note = Synthetic: SSR-0103740
  modified_base 1: mod_base = OTHER; note = 2-fluororibose uracil
  modified_base 1..2: mod_base = OTHER; note = phosphorothioate
  modified_base 2: mod_base = OTHER; note = 2-fluororibose uracil
  modified_base 2..3: mod_base = OTHER; note = phosphorothioate
  modified_base 3: mod_base = um
  modified_base 4: mod_base = OTHER; note = 2-fluororibose cytosine
  modified_base 5: mod_base = OTHER; note = 2-O-methylribose adenine
  modified_base 6: mod_base = OTHER; note = 2-fluororibose uracil
  modified_base 7: mod_base = um
  modified_base 8: mod_base = OTHER; note = 2-fluororibose uracil
  modified_base 9: mod_base = cm
  modified_base 10: mod_base = OTHER; note = 2-fluororibose adenine
  modified_base 11: mod_base = um
  modified_base 12: mod_base = um
  modified_base 13: mod_base = um
  modified_base 14: mod_base = OTHER; note = 2-fluororibose uracil
  modified_base 15: mod_base = gm
  modified_base 16: mod_base = OTHER; note = 2-fluororibose adenine
  modified_base 17: mod_base = um
  modified_base 18: mod_base = OTHER; note = 2-fluororibose uracil
  modified_base 19: mod_base = um
  modified_base 19..20: mod_base = OTHER; note = phosphorothioate
  modified_base 20: mod_base = um
  modified_base 20..21: mod_base = OTHER; note = phosphorothioate
  modified_base 21: mod_base = um
  source 1..21: mol_type = other RNA
tttcatttcattttgattttt

SEQ ID NO: 142 - RNA, 21 nt, synthetic construct
  misc_feature 1..21: note = Synthetic: WV-38368
  misc_feature 1..21: note = Synthetic: SSR-0103618
  modified_base 1: mod_base = OTHER; note = 2-fluororibose uracil
  modified_base 1..2: mod_base = OTHER; note = phosphorothioate
  modified_base 2: mod_base = OTHER; note = 2-fluororibose adenine
  modified_base 2..3: mod_base = OTHER; note = phosphorothioate
  modified_base 3: mod_base = um
  modified_base 4: mod_base = OTHER; note = 2-fluororibose cytosine
  modified_base 5: mod_base = OTHER; note = 2-O-methylribose adenine
  modified_base 6: mod_base = OTHER; note = 2-fluororibose uracil
  modified_base 7: mod_base = um
  modified_base 8: mod_base = OTHER; note = 2-fluororibose adenine
  modified_base 9: mod_base = um
  modified_base 10: mod_base = OTHER; note = 2-fluororibose cytosine
  modified_base 11: mod_base = OTHER; note = 2-O-methylribose adenine
  modified_base 12: mod_base = um
  modified_base 13: mod_base = gm
  modified_base 14: mod_base = OTHER; note = 2-fluororibose cytosine
  modified_base 15: mod_base = OTHER; note = 2-O-methylribose adenine
  modified_base 16: mod_base = OTHER; note = 2-fluororibose uracil
  modified_base 17: mod_base = OTHER; note = 2-O-methylribose adenine
  modified_base 18: mod_base = OTHER; note = 2-fluororibose cytosine
  modified_base 19: mod_base = OTHER; note = 2-O-methylribose adenine
  modified_base 19..20: mod_base = OTHER; note = phosphorothioate
  modified_base 20: mod_base = um
  modified_base 20..21: mod_base = OTHER; note = phosphorothioate
  modified_base 21: mod_base = um
  source 1..21: mol_type = other RNA
tatcattatcatgcatacatt

SEQ ID NO: 143 - RNA, 21 nt, synthetic construct
  misc_feature 1..21: note = Synthetic: WV-38369
  misc_feature 1..21: note = Synthetic: SSR-0103675
  modified_base 1: mod_base = OTHER; note = 2-fluororibose uracil
  modified_base 1..2: mod_base = OTHER; note = phosphorothioate
  modified_base 2: mod_base = OTHER; note = 2-fluororibose guanine
  modified_base 2..3: mod_base = OTHER; note = phosphorothioate
  modified_base 3: mod_base = cm
  modified_base 4: mod_base = OTHER; note = 2-fluororibose uracil
  modified_base 5: mod_base = um
  modified_base 6: mod_base = OTHER; note = 2-fluororibose uracil
  modified_base 7: mod_base = gm
  modified_base 8: mod_base = OTHER; note = 2-fluororibose cytosine
  modified_base 9: mod_base = OTHER; note = 2-O-methylribose adenine
  modified_base 10: mod_base = OTHER; note = 2-fluororibose guanine
  modified_base 11: mod_base = cm
  modified_base 12: mod_base = OTHER; note = 2-O-methylribose adenine
  modified_base 13: mod_base = um
  modified_base 14: mod_base = OTHER; note = 2-fluororibose uracil
  modified_base 15: mod_base = gm
  modified_base 16: mod_base = OTHER; note = 2-fluororibose adenine
  modified_base 17: mod_base = um
  modified_base 18: mod_base = OTHER; note = 2-fluororibose uracil
  modified_base 19: mod_base = cm
  modified_base 19..20: mod_base = OTHER; note = phosphorothioate
  modified_base 20: mod_base = um
  modified_base 20..21: mod_base = OTHER; note = phosphorothioate
  modified_base 21: mod_base = um
  source 1..21: mol_type = other RNA
tgctttgcagcattgattctt

SEQ ID NO: 144 - RNA, 21 nt, synthetic construct
  misc_feature 1..21: note = Synthetic: WV-38370
  misc_feature 1..21: note = Synthetic: SSR-0103602
  modified_base 1: mod_base = OTHER; note = 2-fluororibose uracil
  modified_base 1..2: mod_base = OTHER; note = phosphorothioate
  modified_base 2: mod_base = OTHER; note = 2-fluororibose adenine
  modified_base 2..3: mod_base = OTHER; note = phosphorothioate
  modified_base 3: mod_base = gm
  modified_base 4: mod_base = OTHER; note = 2-fluororibose cytosine
  modified_base 5: mod_base = um
  modified_base 6: mod_base = OTHER; note = 2-fluororibose uracil
  modified_base 7: mod_base = um
  modified_base 8: mod_base = OTHER; note = 2-fluororibose guanine
  modified_base 9: mod_base = cm
  modified_base 10: mod_base = OTHER; note = 2-fluororibose adenine
  modified_base 11: mod_base = gm
  modified_base 12: mod_base = cm
  modified_base 13: mod_base = OTHER; note = 2-O-methylribose adenine
  modified_base 14: mod_base = OTHER; note = 2-fluororibose uracil
  modified_base 15: mod_base = um
  modified_base 16: mod_base = OTHER; note = 2-fluororibose guanine
  modified_base 17: mod_base = OTHER; note = 2-O-methylribose adenine
  modified_base 18: mod_base = OTHER; note = 2-fluororibose uracil
  modified_base 19: mod_base = um
  modified_base 19..20: mod_base = OTHER; note = phosphorothioate
  modified_base 20: mod_base = um
  modified_base 20..21: mod_base = OTHER; note = phosphorothioate
  modified_base 21: mod_base = um
  source 1..21: mol_type = other RNA
tagctttgcagcattgatttt

SEQ ID NO: 145 - RNA, 21 nt, synthetic construct
  misc_feature 1..21: note = Synthetic: WV-38371
  misc_feature 1..21: note = Synthetic: SSR-0103666
  modified_base 1: mod_base = OTHER; note = 2-fluororibose uracil
  modified_base 1..2: mod_base = OTHER; note = phosphorothioate
  modified_base 2: mod_base = OTHER; note = 2-fluororibose guanine
  modified_base 2..3: mod_base = OTHER; note = phosphorothioate
  modified_base 3: mod_base = OTHER; note = 2-O-methylribose adenine
  modified_base 4: mod_base = OTHER; note = 2-fluororibose cytosine
  modified_base 5: mod_base = OTHER; note = 2-O-methylribose adenine
  modified_base 6: mod_base = OTHER; note = 2-fluororibose guanine
  modified_base 7: mod_base = gm
  modified_base 8: mod_base = OTHER; note = 2-fluororibose uracil
  modified_base 9: mod_base = OTHER; note = 2-O-methylribose adenine
  modified_base 10: mod_base = OTHER; note = 2-fluororibose adenine
  modified_base 11: mod_base = um
  modified_base 12: mod_base = um
  modified_base 13: mod_base = OTHER; note = 2-O-methylribose adenine
  modified_base 14: mod_base = OTHER; note = 2-fluororibose adenine
  modified_base 15: mod_base = um
  modified_base 16: mod_base = OTHER; note = 2-fluororibose cytosine
  modified_base 17: mod_base = um
  modified_base 18: mod_base = OTHER; note = 2-fluororibose uracil
  modified_base 19: mod_base = gm
  modified_base 19..20: mod_base = OTHER; note = phosphorothioate
  modified_base 20: mod_base = um
  modified_base 20..21: mod_base = OTHER; note = phosphorothioate
  modified_base 21: mod_base = um
  source 1..21: mol_type = other RNA
tgacaggtaattaatcttgtt

SEQ ID NO: 146 - RNA, 21 nt, synthetic construct
  misc_feature 1..21: note = Synthetic: WV-38372
  misc_feature 1..21: note = Synthetic: SSR-0103724
  modified_base 1: mod_base = OTHER; note = 2-fluororibose uracil
  modified_base 1..2: mod_base = OTHER; note = phosphorothioate
  modified_base 2: mod_base = OTHER; note = 2-fluororibose uracil
  modified_base 2..3: mod_base = OTHER; note = phosphorothioate
  modified_base 3: mod_base = gm
  modified_base 4: mod_base = OTHER; note = 2-fluororibose adenine
  modified_base 5: mod_base = gm
  modified_base 6: mod_base = OTHER; note = 2-fluororibose adenine
  modified_base 7: mod_base = OTHER; note = 2-O-methylribose adenine
  modified_base 8: mod_base = OTHER; note = 2-fluororibose adenine
  modified_base 9: mod_base = cm
  modified_base 10: mod_base = OTHER; note = 2-fluororibose adenine
  modified_base 11: mod_base = gm
  modified_base 12: mod_base = gm
  modified_base 13: mod_base = OTHER; note = 2-O-methylribose adenine
  modified_base 14: mod_base = OTHER; note = 2-fluororibose adenine
  modified_base 15: mod_base = gm
  modified_base 16: mod_base = OTHER; note = 2-fluororibose adenine
  modified_base 17: mod_base = cm
  modified_base 18: mod_base = OTHER; note = 2-fluororibose adenine
  modified_base 19: mod_base = gm
  modified_base 19..20: mod_base = OTHER; note = phosphorothioate
  modified_base 20: mod_base = um
  modified_base 20..21: mod_base = OTHER; note = phosphorothioate
  modified_base 21: mod_base = um
  source 1..21: mol_type = other RNA
ttgagaaacaggaagacagtt

SEQ ID NO: 147 - RNA, 21 nt, synthetic construct
  misc_feature 1..21: note = Synthetic: WV-38373
  misc_feature 1..21: note = Synthetic: SSR-0103720
  modified_base 1: mod_base = OTHER; note = 2-fluororibose uracil
  modified_base 1..2: mod_base = OTHER; note = phosphorothioate
  modified_base 2: mod_base = OTHER; note = 2-fluororibose uracil
  modified_base 2..3: mod_base = OTHER; note = phosphorothioate
  modified_base 3: mod_base = cm
  modified_base 4: mod_base = OTHER; note = 2-fluororibose uracil
  modified_base 5: mod_base = um
  modified_base 6: mod_base = OTHER; note = 2-fluororibose guanine
  modified_base 7: mod_base = OTHER; note = 2-O-methylribose adenine
  modified_base 8: mod_base = OTHER; note = 2-fluororibose guanine
  modified_base 9: mod_base = OTHER; note = 2-O-methylribose adenine
  modified_base 10: mod_base = OTHER; note = 2-fluororibose adenine
  modified_base 11: mod_base = OTHER; note = 2-O-methylribose adenine
  modified_base 12: mod_base = cm
  modified_base 13: mod_base = OTHER; note = 2-O-methylribose adenine
  modified_base 14: mod_base = OTHER; note = 2-fluororibose guanine
  modified_base 15: mod_base = gm
  modified_base 16: mod_base = OTHER; note = 2-fluororibose adenine
  modified_base 17: mod_base = OTHER; note = 2-O-methylribose adenine
  modified_base 18: mod_base = OTHER; note = 2-fluororibose guanine
  modified_base 19: mod_base = OTHER; note = 2-O-methylribose adenine
  modified_base 19..20: mod_base = OTHER; note = phosphorothioate
  modified_base 20: mod_base = um
  modified_base 20..21: mod_base = OTHER; note = phosphorothioate
  modified_base 21: mod_base = um
  source 1..21: mol_type = other RNA
ttcttgagaaacaggaagatt

SEQ ID NO: 148 - RNA, 21 nt, synthetic construct
  misc_feature 1..21: note = Synthetic: WV-38374
  misc_feature 1..21: note = Synthetic: SSR-0103745
  modified_base 1: mod_base = OTHER; note = 2-fluororibose uracil
  modified_base 1..2: mod_base = OTHER; note = phosphorothioate
  modified_base 2: mod_base = OTHER; note = 2-fluororibose uracil
  modified_base 2..3: mod_base = OTHER; note = phosphorothioate
  modified_base 3: mod_base = um
  modified_base 4: mod_base = OTHER; note = 2-fluororibose cytosine
  modified_base 5: mod_base = um
  modified_base 6: mod_base = OTHER; note = 2-fluororibose uracil
  modified_base 7: mod_base = gm
  modified_base 8: mod_base = OTHER; note = 2-fluororibose adenine
  modified_base 9: mod_base = gm
  modified_base 10: mod_base = OTHER; note = 2-fluororibose adenine
  modified_base 11: mod_base = OTHER; note = 2-O-methylribose adenine
  modified_base 12: mod_base = OTHER; note = 2-O-methylribose adenine
  modified_base 13: mod_base = cm
  modified_base 14: mod_base = OTHER; note = 2-fluororibose adenine
  modified_base 15: mod_base = gm
  modified_base 16: mod_base = OTHER; note = 2-fluororibose guanine
  modified_base 17: mod_base = OTHER; note = 2-O-methylribose adenine
  modified_base 18: mod_base = OTHER; note = 2-fluororibose adenine
  modified_base 19: mod_base = gm
  modified_base 19..20: mod_base = OTHER; note = phosphorothioate
  modified_base 20: mod_base = um
  modified_base 20..21: mod_base = OTHER; note = phosphorothioate
  modified_base 21: mod_base = um
  source 1..21: mol_type = other RNA
tttcttgagaaacaggaagtt

SEQ ID NO: 149 - RNA, 21 nt, synthetic construct
  misc_feature 1..21: note = Synthetic: WV-38375
  misc_feature 1..21: note = Synthetic: SSR-0103704
  modified_base 1: mod_base = OTHER; note = 2-fluororibose uracil
  modified_base 1..2: mod_base = OTHER; note = phosphorothioate
  modified_base 2: mod_base = OTHER; note = 2-fluororibose uracil
  modified_base 2..3: mod_base = OTHER; note = phosphorothioate
  modified_base 3: mod_base = OTHER; note = 2-O-methylribose adenine
  modified_base 4: mod_base = OTHER; note = 2-fluororibose uracil
  modified_base 5: mod_base = um
  modified_base 6: mod_base = OTHER; note = 2-fluororibose cytosine
  modified_base 7: mod_base = um
  modified_base 8: mod_base = OTHER; note = 2-fluororibose uracil
  modified_base 9: mod_base = gm
  modified_base 10: mod_base = OTHER; note = 2-fluororibose adenine
  modified_base 11: mod_base = gm
  modified_base 12: mod_base = OTHER; note = 2-O-methylribose adenine
  modified_base 13: mod_base = OTHER; note = 2-O-methylribose adenine
  modified_base 14: mod_base = OTHER; note = 2-fluororibose adenine
  modified_base 15: mod_base = cm
  modified_base 16: mod_base = OTHER; note = 2-fluororibose adenine
  modified_base 17: mod_base = gm
  modified_base 18: mod_base = OTHER; note = 2-fluororibose guanine
  modified_base 19: mod_base = OTHER; note = 2-O-methylribose adenine
  modified_base 19..20: mod_base = OTHER; note = phosphorothioate
  modified_base 20: mod_base = um
  modified_base 20..21: mod_base = OTHER; note = phosphorothioate
  modified_base 21: mod_base = um
  source 1..21: mol_type = other RNA
ttattcttgagaaacaggatt

SEQ ID NO: 150 - RNA, 21 nt, synthetic construct
  misc_feature 1..21: note = Synthetic: WV-38376
  misc_feature 1..21: note = Synthetic: SSR-0103616
  modified_base 1: mod_base = OTHER; note = 2-fluororibose uracil
  modified_base 1..2: mod_base = OTHER; note = phosphorothioate
  modified_base 2: mod_base = OTHER; note = 2-fluororibose adenine
  modified_base 2..3: mod_base = OTHER; note = phosphorothioate
  modified_base 3: mod_base = um
  modified_base 4: mod_base = OTHER; note = 2-fluororibose adenine
  modified_base 5: mod_base = um
  modified_base 6: mod_base = OTHER; note = 2-fluororibose uracil
  modified_base 7: mod_base = cm
  modified_base 8: mod_base = OTHER; note = 2-fluororibose uracil
  modified_base 9: mod_base = um
  modified_base 10: mod_base = OTHER; note = 2-fluororibose guanine
  modified_base 11: mod_base = OTHER; note = 2-O-methylribose adenine
  modified_base 12: mod_base = gm
  modified_base 13: mod_base = OTHER; note = 2-O-methylribose adenine
  modified_base 14: mod_base = OTHER; note = 2-fluororibose adenine
  modified_base 15: mod_base = OTHER; note = 2-O-methylribose adenine
  modified_base 16: mod_base = OTHER; note = 2-fluororibose cytosine
  modified_base 17: mod_base = OTHER; note = 2-O-methylribose adenine
  modified_base 18: mod_base = OTHER; note = 2-fluororibose guanine
  modified_base 19: mod_base = gm
  modified_base 19..20: mod_base = OTHER; note = phosphorothioate
  modified_base 20: mod_base = um
  modified_base 20..21: mod_base = OTHER; note = phosphorothioate
  modified_base 21: mod_base = um
  source 1..21: mol_type = other RNA
tatattcttgagaaacaggtt

SEQ ID NO: 151 - RNA, 21 nt, synthetic construct
  misc_feature 1..21: note = Synthetic: WV-38377
  misc_feature 1..21: note = Synthetic: SSR-0103661
  modified_base 1: mod_base = OTHER; note = 2-fluororibose uracil
  modified_base 1..2: mod_base = OTHER; note = phosphorothioate
  modified_base 2: mod_base = OTHER; note = 2-fluororibose guanine
  modified_base 2..3: mod_base = OTHER; note = phosphorothioate
  modified_base 3: mod_base = OTHER; note = 2-O-methylribose adenine
  modified_base 4: mod_base = OTHER; note = 2-fluororibose adenine
  modified_base 5: mod_base = OTHER; note = 2-O-methylribose adenine
  modified_base 6: mod_base = OTHER; note = 2-fluororibose guanine
  modified_base 7: mod_base = gm
  modified_base 8: mod_base = OTHER; note = 2-fluororibose adenine
  modified_base 9: mod_base = OTHER; note = 2-O-methylribose adenine
  modified_base 10: mod_base = OTHER; note = 2-fluororibose adenine
  modified_base 11: mod_base = OTHER; note = 2-O-methylribose adenine
  modified_base 12: mod_base = OTHER; note = 2-O-methylribose adenine
  modified_base 13: mod_base = cm
  modified_base 14: mod_base = OTHER; note = 2-fluororibose adenine
  modified_base 15: mod_base = gm
  modified_base 16: mod_base = OTHER; note = 2-fluororibose adenine
  modified_base 17: mod_base = cm
  modified_base 18: mod_base = OTHER; note = 2-fluororibose cytosine
  modified_base 19: mod_base = um
  modified_base 19..20: mod_base = OTHER; note = phosphorothioate
  modified_base 20: mod_base = um
  modified_base 20..21: mod_base = OTHER; note = phosphorothioate
  modified_base 21: mod_base = um
  source 1..21: mol_type = other RNA
tgaaaggaaaaacagaccttt

SEQ ID NO: 152 - RNA, 21 nt, synthetic construct
  misc_feature 1..21: note = Synthetic: WV-38378
  misc_feature 1..21: note = Synthetic: SSR-0103722
  modified_base 1: mod_base = OTHER; note = 2-fluororibose uracil
  modified_base 1..2: mod_base = OTHER; note = phosphorothioate
  modified_base 2: mod_base = OTHER; note = 2-fluororibose uracil
  modified_base 2..3: mod_base = OTHER; note = phosphorothioate
  modified_base 3: mod_base = gm
  modified_base 4: mod_base = OTHER; note = 2-fluororibose adenine
  modified_base 5: mod_base = OTHER; note = 2-O-methylribose adenine
  modified_base 6: mod_base = OTHER; note = 2-fluororibose adenine
  modified_base 7: mod_base = gm
  modified_base 8: mod_base = OTHER; note = 2-fluororibose guanine
  modified_base 9: mod_base = OTHER; note = 2-O-methylribose adenine
  modified_base 10: mod_base = OTHER; note = 2-fluororibose adenine
  modified_base 11: mod_base = OTHER; note = 2-O-methylribose adenine
  modified_base 12: mod_base = OTHER; note = 2-O-methylribose adenine
  modified_base 13: mod_base = OTHER; note = 2-O-methylribose adenine
  modified_base 14: mod_base = OTHER; note = 2-fluororibose cytosine
  modified_base 15: mod_base = OTHER; note = 2-O-methylribose adenine
  modified_base 16: mod_base = OTHER; note = 2-fluororibose guanine
  modified_base 17: mod_base = OTHER; note = 2-O-methylribose adenine
  modified_base 18: mod_base = OTHER; note = 2-fluororibose cytosine
  modified_base 19: mod_base = cm
  modified_base 19..20: mod_base = OTHER; note = phosphorothioate
  modified_base 20: mod_base = um
  modified_base 20..21: mod_base = OTHER; note = phosphorothioate
  modified_base 21: mod_base = um
  source 1..21: mol_type = other RNA
ttgaaaggaaaaacagacctt

SEQ ID NO: 153 - RNA, 21 nt, synthetic construct
  misc_feature 1..21: note = Synthetic: WV-38379
  misc_feature 1..21: note = Synthetic: SSR-0103623
  modified_base 1: mod_base = OTHER; note = 2-fluororibose uracil
  modified_base 1..2: mod_base = OTHER; note = phosphorothioate
  modified_base 2: mod_base = OTHER; note = 2-fluororibose adenine
  modified_base 2..3: mod_base = OTHER; note = phosphorothioate
  modified_base 3: mod_base = um
  modified_base 4: mod_base = OTHER; note = 2-fluororibose guanine
  modified_base 5: mod_base = um
  modified_base 6: mod_base = OTHER; note = 2-fluororibose uracil
  modified_base 7: mod_base = um
  modified_base 8: mod_base = OTHER; note = 2-fluororibose adenine
  modified_base 9: mod_base = um
  modified_base 10: mod_base = OTHER; note = 2-fluororibose guanine
  modified_base 11: mod_base = um
  modified_base 12: mod_base = OTHER; note = 2-O-methylribose adenine
  modified_base 13: mod_base = OTHER; note = 2-O-methylribose adenine
  modified_base 14: mod_base = OTHER; note = 2-fluororibose guanine
  modified_base 15: mod_base = cm
  modified_base 16: mod_base = OTHER; note = 2-fluororibose adenine
  modified_base 17: mod_base = cm
  modified_base 18: mod_base = OTHER; note = 2-fluororibose adenine
  modified_base 19: mod_base = gm
  modified_base 19..20: mod_base = OTHER; note = phosphorothioate
  modified_base 20: mod_base = um
  modified_base 20..21: mod_base = OTHER; note = phosphorothioate
  modified_base 21: mod_base = um
  source 1..21: mol_type = other RNA
tatgtttatgtaagcacagtt

SEQ ID NO: 154 - RNA, 21 nt, synthetic construct
  misc_feature 1..21: note = Synthetic: WV-38380
  misc_feature 1..21: note = Synthetic: SSR-0103579
  modified_base 1: mod_base = OTHER; note = 2-fluororibose uracil
  modified_base 1..2: mod_base = OTHER; note = phosphorothioate
  modified_base 2: mod_base = OTHER; note = 2-fluororibose adenine
  modified_base 2..3: mod_base = OTHER; note = phosphorothioate
  modified_base 3: mod_base = OTHER; note = 2-O-methylribose adenine
  modified_base 4: mod_base = OTHER; note = 2-fluororibose guanine
  modified_base 5: mod_base = um
  modified_base 6: mod_base = OTHER; note = 2-fluororibose adenine
  modified_base 7: mod_base = um
  modified_base 8: mod_base = OTHER; note = 2-fluororibose guanine
  modified_base 9: mod_base = um
  modified_base 10: mod_base = OTHER; note = 2-fluororibose uracil
  modified_base 11: mod_base = um
  modified_base 12: mod_base = OTHER; note = 2-O-methylribose adenine
  modified_base 13: mod_base = um
  modified_base 14: mod_base = OTHER; note = 2-fluororibose guanine
  modified_base 15: mod_base = um
  modified_base 16: mod_base = OTHER; note = 2-fluororibose adenine
  modified_base 17: mod_base = OTHER; note = 2-O-methylribose adenine
  modified_base 18: mod_base = OTHER; note = 2-fluororibose guanine
  modified_base 19: mod_base = cm
  modified_base 19..20: mod_base = OTHER; note = phosphorothioate
  modified_base 20: mod_base = um
  modified_base 20..21: mod_base = OTHER; note = phosphorothioate
  modified_base 21: mod_base = um
  source 1..21: mol_type = other RNA
taagtatgtttatgtaagctt

SEQ ID NO: 155 - RNA, 21 nt, synthetic construct
  misc_feature 1..21: note = Synthetic: WV-38381
  misc_feature 1..21: note = Synthetic: SSR-0103692
  modified_base 1: mod_base = OTHER; note = 2-fluororibose uracil
  modified_base 1..2: mod_base = OTHER; note = phosphorothioate
  modified_base 2: mod_base = OTHER; note = 2-fluororibose uracil
  modified_base 2..3: mod_base = OTHER; note = phosphorothioate
  modified_base 3: mod_base = OTHER; note = 2-O-methylribose adenine
  modified_base 4: mod_base = OTHER; note = 2-fluororibose adenine
  modified_base 5: mod_base = gm
  modified_base 6: mod_base = OTHER; note = 2-fluororibose uracil
  modified_base 7: mod_base = OTHER; note = 2-O-methylribose adenine
  modified_base 8: mod_base = OTHER; note = 2-fluororibose uracil
  modified_base 9: mod_base = gm
  modified_base 10: mod_base = OTHER; note = 2-fluororibose uracil
  modified_base 11: mod_base = um
  modified_base 12: mod_base = um
  modified_base 13: mod_base = OTHER; note = 2-O-methylribose adenine
  modified_base 14: mod_base = OTHER; note = 2-fluororibose uracil
  modified_base 15: mod_base = gm
  modified_base 16: mod_base = OTHER; note = 2-fluororibose uracil
  modified_base 17: mod_base = OTHER; note = 2-O-methylribose adenine
  modified_base 18: mod_base = OTHER; note = 2-fluororibose adenine
  modified_base 19: mod_base = gm
  modified_base 19..20: mod_base = OTHER; note = phosphorothioate
  modified_base 20: mod_base = um
  modified_base 20..21: mod_base = OTHER; note = phosphorothioate
  modified_base 21: mod_base = um
  source 1..21: mol_type = other RNA
ttaagtatgtttatgtaagtt

SEQ ID NO: 156 - RNA, 21 nt, synthetic construct
  misc_feature 1..21: note = Synthetic: WV-38382
  misc_feature 1..21: note = Synthetic: SSR-0103576
  modified_base 1: mod_base = OTHER; note = 2-fluororibose uracil
  modified_base 1..2: mod_base = OTHER; note = phosphorothioate
  modified_base 2: mod_base = OTHER; note = 2-fluororibose adenine
  modified_base 2..3: mod_base = OTHER; note = phosphorothioate
  modified_base 3: mod_base = OTHER; note = 2-O-methylribose adenine
  modified_base 4: mod_base = OTHER; note = 2-fluororibose adenine
  modified_base 5: mod_base = gm
  modified_base 6: mod_base = OTHER; note = 2-fluororibose adenine
  modified_base 7: mod_base = OTHER; note = 2-O-methylribose adenine
  modified_base 8: mod_base = OTHER; note = 2-fluororibose adenine
  modified_base 9: mod_base = OTHER; note = 2-O-methylribose adenine
  modified_base 10: mod_base = OTHER; note = 2-fluororibose cytosine
  modified_base 11: mod_base = cm
  modified_base 12: mod_base = um
  modified_base 13: mod_base = um
  modified_base 14: mod_base = OTHER; note = 2-fluororibose uracil
  modified_base 15: mod_base = um
  modified_base 16: mod_base = OTHER; note = 2-fluororibose adenine
  modified_base 17: mod_base = OTHER; note = 2-O-methylribose adenine
  modified_base 18: mod_base = OTHER; note = 2-fluororibose guanine
  modified_base 19: mod_base = um
  modified_base 19..20: mod_base = OTHER; note = phosphorothioate
  modified_base 20: mod_base = um
  modified_base 20..21: mod_base = OTHER; note = phosphorothioate
  modified_base 21: mod_base = um
  source 1..21: mol_type = other RNA
taaagaaaaccttttaagttt

SEQ ID NO: 157 - RNA, 21 nt, synthetic construct
  misc_feature 1..21: note = Synthetic: WV-38383
  misc_feature 1..21: note = Synthetic: SSR-0103691
  modified_base 1: mod_base = OTHER; note = 2-fluororibose uracil
  modified_base 1..2: mod_base = OTHER; note = phosphorothioate
  modified_base 2: mod_base = OTHER; note = 2-fluororibose uracil
  modified_base 2..3: mod_base = OTHER; note = phosphorothioate
  modified_base 3: mod_base = OTHER; note = 2-O-methylribose adenine
  modified_base 4: mod_base = OTHER; note = 2-fluororibose adenine
  modified_base 5: mod_base = OTHER; note = 2-O-methylribose adenine
  modified_base 6: mod_base = OTHER; note = 2-fluororibose guanine
  modified_base 7: mod_base = OTHER; note = 2-O-methylribose adenine
  modified_base 8: mod_base = OTHER; note = 2-fluororibose adenine
  modified_base 9: mod_base = OTHER; note = 2-O-methylribose adenine
  modified_base 10: mod_base = OTHER; note = 2-fluororibose adenine
  modified_base 11: mod_base = cm
  modified_base 12: mod_base = cm
  modified_base 13: mod_base = um
  modified_base 14: mod_base = OTHER; note = 2-fluororibose uracil
  modified_base 15: mod_base = um
  modified_base 16: mod_base = OTHER; note = 2-fluororibose uracil
  modified_base 17: mod_base = OTHER; note = 2-O-methylribose adenine
  modified_base 18: mod_base = OTHER; note = 2-fluororibose adenine
  modified_base 19: mod_base = gm
  modified_base 19..20: mod_base = OTHER; note = phosphorothioate
  modified_base 20: mod_base = um
  modified_base 20..21: mod_base = OTHER; note = phosphorothioate
  modified_base 21: mod_base = um
  source 1..21: mol_type = other RNA
ttaaagaaaaccttttaagtt

SEQ ID NO: 158 - RNA, 21 nt, synthetic construct
  misc_feature 1..21: note = Synthetic: WV-38384
  misc_feature 1..21: note = Synthetic: SSR-0103620
  modified_base 1: mod_base = OTHER; note = 2-fluororibose uracil
  modified_base 1..2: mod_base = OTHER; note = phosphorothioate
  modified_base 2: mod_base = OTHER; note = 2-fluororibose adenine
  modified_base 2..3: mod_base = OTHER; note = phosphorothioate
  modified_base 3: mod_base = um
  modified_base 4: mod_base = OTHER; note = 2-fluororibose cytosine
  modified_base 5: mod_base = um
  modified_base 6: mod_base = OTHER; note = 2-fluororibose uracil
  modified_base 7: mod_base = OTHER; note = 2-O-methylribose adenine
  modified_base 8: mod_base = OTHER; note = 2-fluororibose adenine
  modified_base 9: mod_base = OTHER; note = 2-O-methylribose adenine
  modified_base 10: mod_base = OTHER; note = 2-fluororibose guanine
  modified_base 11: mod_base = OTHER; note = 2-O-methylribose adenine
  modified_base 12: mod_base = OTHER; note = 2-O-methylribose adenine
  modified_base 13: mod_base = OTHER; note = 2-O-methylribose adenine
  modified_base 14: mod_base = OTHER; note = 2-fluororibose adenine
  modified_base 15: mod_base = cm
  modified_base 16: mod_base = OTHER; note = 2-fluororibose cytosine
  modified_base 17: mod_base = um
  modified_base 18: mod_base = OTHER; note = 2-fluororibose uracil
  modified_base 19: mod_base = um
  modified_base 19..20: mod_base = OTHER; note = phosphorothioate
  modified_base 20: mod_base = um
  modified_base 20..21: mod_base = OTHER; note = phosphorothioate
  modified_base 21: mod_base = um
  source 1..21: mol_type = other RNA
tatcttaaagaaaaccttttt

SEQ ID NO: 159 - RNA, 21 nt, synthetic construct
  misc_feature 1..21: note = Synthetic: WV-38385
  misc_feature 1..21: note = Synthetic: SSR-0103615
  modified_base 1: mod_base = OTHER; note = 2-fluororibose uracil
  modified_base 1..2: mod_base = OTHER; note = phosphorothioate
  modified_base 2: mod_base = OTHER; note = 2-fluororibose adenine
  modified_base 2..3: mod_base = OTHER; note = phosphorothioate
  modified_base 3: mod_base = um
  modified_base 4: mod_base = OTHER; note = 2-fluororibose adenine
  modified_base 5: mod_base = um
  modified_base 6: mod_base = OTHER; note = 2-fluororibose cytosine
  modified_base 7: mod_base = um
  modified_base 8: mod_base = OTHER; note = 2-fluororibose uracil
  modified_base 9: mod_base = OTHER; note = 2-O-methylribose adenine
  modified_base 10: mod_base = OTHER; note = 2-fluororibose adenine
  modified_base 11: mod_base = OTHER; note = 2-O-methylribose adenine
  modified_base 12: mod_base = gm
  modified_base 13: mod_base = OTHER; note = 2-O-methylribose adenine
  modified_base 14: mod_base = OTHER; note = 2-fluororibose adenine
  modified_base 15: mod_base = OTHER; note = 2-O-methylribose adenine
  modified_base 16: mod_base = OTHER; note = 2-fluororibose adenine
  modified_base 17: mod_base = cm
  modified_base 18: mod_base = OTHER; note = 2-fluororibose cytosine
  modified_base 19: mod_base = um
  modified_base 19..20: mod_base = OTHER; note = phosphorothioate
  modified_base 20: mod_base = um
  modified_base 20..21: mod_base = OTHER; note = phosphorothioate
  modified_base 21: mod_base = um
  source 1..21: mol_type = other RNA
tatatcttaaagaaaaccttt

SEQ ID NO: 160 - RNA, 21 nt, synthetic construct
  misc_feature 1..21: note = Synthetic: WV-38386
  misc_feature 1..21: note = Synthetic: SSR-0103582
  modified_base 1: mod_base = OTHER; note = 2-fluororibose uracil
  modified_base 1..2: mod_base = OTHER; note = phosphorothioate
  modified_base 2: mod_base = OTHER; note = 2-fluororibose adenine
  modified_base 2..3: mod_base = OTHER; note = phosphorothioate
  modified_base 3: mod_base = OTHER; note = 2-O-methylribose adenine
  modified_base 4: mod_base = OTHER; note = 2-fluororibose uracil
  modified_base 5: mod_base = OTHER; note = 2-O-methylribose adenine
  modified_base 6: mod_base = OTHER; note = 2-fluororibose uracil
  modified_base 7: mod_base = cm
  modified_base 8: mod_base = OTHER; note = 2-fluororibose uracil
  modified_base 9: mod_base = um
  modified_base 10: mod_base = OTHER; note = 2-fluororibose adenine
  modified_base 11: mod_base = OTHER; note = 2-O-methylribose adenine
  modified_base 12: mod_base = OTHER; note = 2-O-methylribose adenine
  modified_base 13: mod_base = gm
  modified_base 14: mod_base = OTHER; note = 2-fluororibose adenine
  modified_base 15: mod_base = OTHER; note = 2-O-methylribose adenine
  modified_base 16: mod_base = OTHER; note = 2-fluororibose adenine
  modified_base 17: mod_base = OTHER; note = 2-O-methylribose adenine
  modified_base 18: mod_base = OTHER; note = 2-fluororibose cytosine
  modified_base 19: mod_base = cm
  modified_base 19..20: mod_base = OTHER; note = phosphorothioate
  modified_base 20: mod_base = um
  modified_base 20..21: mod_base = OTHER; note = phosphorothioate
  modified_base 21: mod_base = um
  source 1..21: mol_type = other RNA
taatatcttaaagaaaacctt

SEQ ID NO: 161 - RNA, 21 nt, synthetic construct
  misc_feature 1..21: note = Synthetic: WV-38387
  misc_feature 1..21: note = Synthetic: SSR-0103754
  modified_base 1: mod_base = OTHER; note = 2-fluororibose uracil
  modified_base 1..2: mod_base = OTHER; note = phosphorothioate
  modified_base 2: mod_base = OTHER; note = 2-fluororibose uracil
  modified_base 2..3: mod_base = OTHER; note = phosphorothioate
  modified_base 3: mod_base = um
  modified_base 4: mod_base = OTHER; note = 2-fluororibose guanine
  modified_base 5: mod_base = um
  modified_base 6: mod_base = OTHER; note = 2-fluororibose cytosine
  modified_base 7: mod_base = cm
  modified_base 8: mod_base = OTHER; note = 2-fluororibose adenine
  modified_base 9: mod_base = cm
  modified_base 10: mod_base = OTHER; note = 2-fluororibose cytosine
  modified_base 11: mod_base = um
  modified_base 12: mod_base = um
  modified_base 13: mod_base = um
  modified_base 14: mod_base = OTHER; note = 2-fluororibose adenine
  modified_base 15: mod_base = OTHER; note = 2-O-methylribose adenine
  modified_base 16: mod_base = OTHER; note = 2-fluororibose adenine
  modified_base 17: mod_base = um
  modified_base 18: mod_base = OTHER; note = 2-fluororibose guanine
  modified_base 19: mod_base = gm
  modified_base 19..20: mod_base = OTHER; note = phosphorothioate
  modified_base 20: mod_base = um
  modified_base 20..21: mod_base = OTHER; note = phosphorothioate
  modified_base 21: mod_base = um
  source 1..21: mol_type = other RNA
tttgtccacctttaaatggtt

SEQ ID NO: 162 - RNA, 21 nt, synthetic construct
  misc_feature 1..21: note = Synthetic: WV-38388
  misc_feature 1..21: note = Synthetic: SSR-0103764
  modified_base 1: mod_base = OTHER; note = 2-fluororibose uracil
  modified_base 1..2: mod_base = OTHER; note = phosphorothioate
  modified_base 2: mod_base = OTHER; note = 2-fluororibose uracil
  modified_base 2..3: mod_base = OTHER; note = phosphorothioate
  modified_base 3: mod_base = um
  modified_base 4: mod_base = OTHER; note = 2-fluororibose uracil
  modified_base 5: mod_base = gm
  modified_base 6: mod_base = OTHER; note = 2-fluororibose uracil
  modified_base 7: mod_base = cm
  modified_base 8: mod_base = OTHER; note = 2-fluororibose cytosine
  modified_base 9: mod_base = OTHER; note = 2-O-methylribose adenine
  modified_base 10: mod_base = OTHER; note = 2-fluororibose cytosine
  modified_base 11: mod_base = cm
  modified_base 12: mod_base = um
  modified_base 13: mod_base = um
  modified_base 14: mod_base = OTHER; note = 2-fluororibose uracil
  modified_base 15: mod_base = OTHER; note = 2-O-methylribose adenine
  modified_base 16: mod_base = OTHER; note = 2-fluororibose adenine
  modified_base 17: mod_base = OTHER; note = 2-O-methylribose adenine
  modified_base 18: mod_base = OTHER; note = 2-fluororibose uracil
  modified_base 19: mod_base = gm
  modified_base 19..20: mod_base = OTHER; note = phosphorothioate
  modified_base 20: mod_base = um
  modified_base 20..21: mod_base = OTHER; note = phosphorothioate
  modified_base 21: mod_base = um
  source 1..21: mol_type = other RNA
ttttgtccacctttaaatgtt

SEQ ID NO: 163 - RNA, 21 nt, synthetic construct
  misc_feature 1..21: note = Synthetic: WV-38389
  misc_feature 1..21: note = Synthetic: SSR-0103739
  modified_base 1: mod_base = OTHER; note = 2-fluororibose uracil
  modified_base 1..2: mod_base = OTHER; note = phosphorothioate
  modified_base 2: mod_base = OTHER; note = 2-fluororibose uracil
  modified_base 2..3: mod_base = OTHER; note = phosphorothioate
  modified_base 3: mod_base = um
  modified_base 4: mod_base = OTHER; note = 2-fluororibose adenine
  modified_base 5: mod_base = cm
  modified_base 6: mod_base = OTHER; note = 2-fluororibose uracil
  modified_base 7: mod_base = um
  modified_base 8: mod_base = OTHER; note = 2-fluororibose uracil
  modified_base 9: mod_base = um
  modified_base 10: mod_base = OTHER; note = 2-fluororibose adenine
  modified_base 11: mod_base = gm
  modified_base 12: mod_base = gm
  modified_base 13: mod_base = gm
  modified_base 14: mod_base = OTHER; note = 2-fluororibose adenine
  modified_base 15: mod_base = gm
  modified_base 16: mod_base = OTHER; note = 2-fluororibose guanine
  modified_base 17: mod_base = um
  modified_base 18: mod_base = OTHER; note = 2-fluororibose adenine
  modified_base 19: mod_base = gm
  modified_base 19..20: mod_base = OTHER; note = phosphorothioate
  modified_base 20: mod_base = um
  modified_base 20..21: mod_base = OTHER; note = phosphorothioate
  modified_base 21: mod_base = um
  source 1..21: mol_type = other RNA
tttacttttagggaggtagtt

SEQ ID NO: 164 - RNA, 21 nt, synthetic construct
  misc_feature 1..21: note = Synthetic: WV-38390
  misc_feature 1..21: note = Synthetic: SSR-0103753
  modified_base 1: mod_base = OTHER; note = 2-fluororibose uracil
  modified_base 1..2: mod_base = OTHER; note = phosphorothioate
  modified_base 2: mod_base = OTHER; note = 2-fluororibose uracil
  modified_base 2..3: mod_base = OTHER; note = phosphorothioate
  modified_base 3: mod_base = um
  modified_base 4: mod_base = OTHER; note = 2-fluororibose guanine
  modified_base 5: mod_base = um
  modified_base 6: mod_base = OTHER; note = 2-fluororibose adenine
  modified_base 7: mod_base = um
  modified_base 8: mod_base = OTHER; note = 2-fluororibose uracil
  modified_base 9: mod_base = um
  modified_base 10: mod_base = OTHER; note = 2-fluororibose adenine
  modified_base 11: mod_base = cm
  modified_base 12: mod_base = um
  modified_base 13: mod_base = um
  modified_base 14: mod_base = OTHER; note = 2-fluororibose uracil
  modified_base 15: mod_base = um
  modified_base 16: mod_base = OTHER; note = 2-fluororibose adenine
  modified_base 17: mod_base = gm
  modified_base 18: mod_base = OTHER; note = 2-fluororibose guanine
  modified_base 19: mod_base = gm
  modified_base 19..20: mod_base = OTHER; note = phosphorothioate
  modified_base 20: mod_base = um
  modified_base 20..21: mod_base = OTHER; note = phosphorothioate
  modified_base 21: mod_base = um
  source 1..21: mol_type = other RNA
tttgtatttacttttagggtt

SEQ ID NO: 165 - RNA, 21 nt, synthetic construct
  misc_feature 1..21: note = Synthetic: WV-38391
  misc_feature 1..21: note = Synthetic: SSR-0103660
  modified_base 1: mod_base = OTHER; note = 2-fluororibose uracil
  modified_base 1..2: mod_base = OTHER; note = phosphorothioate
  modified_base 2: mod_base = OTHER; note = 2-fluororibose cytosine
  modified_base 2..3: mod_base = OTHER; note = phosphorothioate
  modified_base 3: mod_base = um
  modified_base 4: mod_base = OTHER; note = 2-fluororibose uracil
  modified_base 5: mod_base = um
  modified_base 6: mod_base = OTHER; note = 2-fluororibose guanine
  modified_base 7: mod_base = um
  modified_base 8: mod_base = OTHER; note = 2-fluororibose adenine
  modified_base 9: mod_base = um
  modified_base 10: mod_base = OTHER; note = 2-fluororibose uracil
  modified_base 11: mod_base = um
  modified_base 12: mod_base = OTHER; note = 2-O-methylribose adenine
  modified_base 13: mod_base = cm
  modified_base 14: mod_base = OTHER; note = 2-fluororibose uracil
  modified_base 15: mod_base = um
  modified_base 16: mod_base = OTHER; note = 2-fluororibose uracil
  modified_base 17: mod_base = um
  modified_base 18: mod_base = OTHER; note = 2-fluororibose adenine
  modified_base 19: mod_base = gm
  modified_base 19..20: mod_base = OTHER; note = phosphorothioate
  modified_base 20: mod_base = um
  modified_base 20..21: mod_base = OTHER; note = phosphorothioate
  modified_base 21: mod_base = um
  source 1..21: mol_type = other RNA
tctttgtatttacttttagtt

SEQ ID NO: 166 - RNA, 21 nt, synthetic construct
  misc_feature 1..21: note = Synthetic: WV-38392
  misc_feature 1..21: note = Synthetic: SSR-0103588
  modified_base 1: mod_base = OTHER; note = 2-fluororibose uracil
  modified_base 1..2: mod_base = OTHER; note = phosphorothioate
  modified_base 2: mod_base = OTHER; note = 2-fluororibose adenine
  modified_base 2..3: mod_base = OTHER; note = phosphorothioate
  modified_base 3: mod_base = cm
  modified_base 4: mod_base = OTHER; note = 2-fluororibose adenine
  modified_base 5: mod_base = gm
  modified_base 6: mod_base = OTHER; note = 2-fluororibose uracil
  modified_base 7: mod_base = cm
  modified_base 8: mod_base = OTHER; note = 2-fluororibose uracil
  modified_base 9: mod_base = um
  modified_base 10: mod_base = OTHER; note = 2-fluororibose adenine
  modified_base 11: mod_base = OTHER; note = 2-O-methylribose adenine
  modified_base 12: mod_base = OTHER; note = 2-O-methylribose adenine
  modified_base 13: mod_base = cm
  modified_base 14: mod_base = OTHER; note = 2-fluororibose cytosine
  modified_base 15: mod_base = um
  modified_base 16: mod_base = OTHER; note = 2-fluororibose uracil
  modified_base 17: mod_base = cm
  modified_base 18: mod_base = OTHER; note = 2-fluororibose cytosine
  modified_base 19: mod_base = cm
  modified_base 19..20: mod_base = OTHER; note = phosphorothioate
  modified_base 20: mod_base = um
  modified_base 20..21: mod_base = OTHER; note = phosphorothioate
  modified_base 21: mod_base = um
  source 1..21: mol_type = other RNA
tacagtcttaaaccttccctt

SEQ ID NO: 167 - RNA, 21 nt, synthetic construct
  misc_feature 1..21: note = Synthetic: WV-38393
  misc_feature 1..21: note = Synthetic: SSR-0103662
  modified_base 1: mod_base = OTHER; note = 2-fluororibose uracil
  modified_base 1..2: mod_base = OTHER; note = phosphorothioate
  modified_base 2: mod_base = OTHER; note = 2-fluororibose guanine
  modified_base 2..3: mod_base = OTHER; note = phosphorothioate
  modified_base 3: mod_base = OTHER; note = 2-O-methylribose adenine
  modified_base 4: mod_base = OTHER; note = 2-fluororibose adenine
  modified_base 5: mod_base = cm
  modified_base 6: mod_base = OTHER; note = 2-fluororibose adenine
  modified_base 7: mod_base = gm
  modified_base 8: mod_base = OTHER; note = 2-fluororibose uracil
  modified_base 9: mod_base = cm
  modified_base 10: mod_base = OTHER; note = 2-fluororibose uracil
  modified_base 11: mod_base = um
  modified_base 12: mod_base = OTHER; note = 2-O-methylribose adenine
  modified_base 13: mod_base = OTHER; note = 2-O-methylribose adenine
  modified_base 14: mod_base = OTHER; note = 2-fluororibose adenine
  modified_base 15: mod_base = cm
  modified_base 16: mod_base = OTHER; note = 2-fluororibose cytosine
  modified_base 17: mod_base = um
  modified_base 18: mod_base = OTHER; note = 2-fluororibose uracil
  modified_base 19: mod_base = cm
  modified_base 19..20: mod_base = OTHER; note = phosphorothioate
  modified_base 20: mod_base = um
  modified_base 20..21: mod_base = OTHER; note = phosphorothioate
  modified_base 21: mod_base = um
  source 1..21: mol_type = other RNA
tgaacagtcttaaaccttctt

SEQ ID NO: 168 - RNA, 21 nt, synthetic construct
  misc_feature 1..21: note = Synthetic: WV-38394
  misc_feature 1..21: note = Synthetic: SSR-0103723
  modified_base 1: mod_base = OTHER; note = 2-fluororibose uracil
  modified_base 1..2: mod_base = OTHER; note = phosphorothioate
  modified_base 2: mod_base = OTHER; note = 2-fluororibose uracil
  modified_base 2..3: mod_base = OTHER; note = phosphorothioate
  modified_base 3: mod_base = gm
  modified_base 4: mod_base = OTHER; note = 2-fluororibose adenine
  modified_base 5: mod_base = OTHER; note = 2-O-methylribose adenine
  modified_base 6: mod_base = OTHER; note = 2-fluororibose cytosine
  modified_base 7: mod_base = OTHER; note = 2-O-methylribose adenine
  modified_base 8: mod_base = OTHER; note = 2-fluororibose guanine
  modified_base 9: mod_base = um
  modified_base 10: mod_base = OTHER; note = 2-fluororibose cytosine
  modified_base 11: mod_base = um
  modified_base 12: mod_base = um
  modified_base 13: mod_base = OTHER; note = 2-O-methylribose adenine
  modified_base 14: mod_base = OTHER; note = 2-fluororibose adenine
  modified_base 15: mod_base = OTHER; note = 2-O-methylribose adenine
  modified_base 16: mod_base = OTHER; note = 2-fluororibose cytosine
  modified_base 17: mod_base = cm
  modified_base 18: mod_base = OTHER; note = 2-fluororibose uracil
  modified_base 19: mod_base = um
  modified_base 19..20: mod_base = OTHER; note = phosphorothioate
  modified_base 20: mod_base = um
  modified_base 20..21: mod_base = OTHER; note = phosphorothioate
  modified_base 21: mod_base = um
  source 1..21: mol_type = other RNA
ttgaacagtcttaaacctttt

SEQ ID NO: 169 - RNA, 21 nt, synthetic construct
  misc_feature 1..21: note = Synthetic: WV-38395
  misc_feature 1..21: note = Synthetic: SSR-0103657
  modified_base 1: mod_base = OTHER; note = 2-fluororibose uracil
  modified_base 1..2: mod_base = OTHER; note = phosphorothioate
  modified_base 2: mod_base = OTHER; note = 2-fluororibose cytosine
  modified_base 2..3: mod_base = OTHER; note = phosphorothioate
  modified_base 3: mod_base = um
  modified_base 4: mod_base = OTHER; note = 2-fluororibose uracil
  modified_base 5: mod_base = gm
  modified_base 6: mod_base = OTHER; note = 2-fluororibose adenine
  modified_base 7: mod_base = OTHER; note = 2-O-methylribose adenine
  modified_base 8: mod_base = OTHER; note = 2-fluororibose cytosine
  modified_base 9: mod_base = OTHER; note = 2-O-methylribose adenine
  modified_base 10: mod_base = OTHER; note = 2-fluororibose guanine
  modified_base 11: mod_base = um
  modified_base 12: mod_base = cm
  modified_base 13: mod_base = um
  modified_base 14: mod_base = OTHER; note = 2-fluororibose uracil
  modified_base 15: mod_base = OTHER; note = 2-O-methylribose adenine
  modified_base 16: mod_base = OTHER; note = 2-fluororibose adenine
  modified_base 17: mod_base = OTHER; note = 2-O-methylribose adenine
  modified_base 18: mod_base = OTHER; note = 2-fluororibose cytosine
  modified_base 19: mod_base = cm
  modified_base 19..20: mod_base = OTHER; note = phosphorothioate
  modified_base 20: mod_base = um
  modified_base 20..21: mod_base = OTHER; note = phosphorothioate
  modified_base 21: mod_base = um
  source 1..21: mol_type = other RNA
tcttgaacagtcttaaacctt

SEQ ID NO: 170 - RNA, 21 nt, synthetic construct
  misc_feature 1..21: note = Synthetic: WV-38396
  misc_feature 1..21: note = Synthetic: SSR-0103594
  modified_base 1: mod_base = OTHER; note = 2-fluororibose uracil
  modified_base 1..2: mod_base = OTHER; note = phosphorothioate
  modified_base 2: mod_base = OTHER; note = 2-fluororibose adenine
  modified_base 2..3: mod_base = OTHER; note = phosphorothioate
  modified_base 3: mod_base = cm
  modified_base 4: mod_base = OTHER; note = 2-fluororibose uracil
  modified_base 5: mod_base = um
  modified_base 6: mod_base = OTHER; note = 2-fluororibose guanine
  modified_base 7: mod_base = OTHER; note = 2-O-methylribose adenine
  modified_base 8: mod_base = OTHER; note = 2-fluororibose adenine
  modified_base 9: mod_base = cm
  modified_base 10: mod_base = OTHER; note = 2-fluororibose adenine
  modified_base 11: mod_base = gm
  modified_base 12: mod_base = um
  modified_base 13: mod_base = cm
  modified_base 14: mod_base = OTHER; note = 2-fluororibose uracil
  modified_base 15: mod_base = um
  modified_base 16: mod_base = OTHER; note = 2-fluororibose adenine
  modified_base 17: mod_base = OTHER; note = 2-O-methylribose adenine
  modified_base 18: mod_base = OTHER; note = 2-fluororibose adenine
  modified_base 19: mod_base = cm
  modified_base 19..20: mod_base = OTHER; note = phosphorothioate
  modified_base 20: mod_base = um
  modified_base 20..21: mod_base = OTHER; note = phosphorothioate
  modified_base 21: mod_base = um
  source 1..21: mol_type = other RNA
tacttgaacagtcttaaactt

SEQ ID NO: 171 - RNA, 21 nt, synthetic construct
  misc_feature 1..21: note = Synthetic: WV-38397
  misc_feature 1..21: note = Synthetic: SSR-0103622
  modified_base 1: mod_base = OTHER; note = 2-fluororibose uracil
  modified_base 1..2: mod_base = OTHER; note = phosphorothioate
  modified_base 2: mod_base = OTHER; note = 2-fluororibose adenine
  modified_base 2..3: mod_base = OTHER; note = phosphorothioate
  modified_base 3: mod_base = um
  modified_base 4: mod_base = OTHER; note = 2-fluororibose guanine
  modified_base 5: mod_base = cm
  modified_base 6: mod_base = OTHER; note = 2-fluororibose uracil
  modified_base 7: mod_base = OTHER; note = 2-O-methylribose adenine
  modified_base 8: mod_base = OTHER; note = 2-fluororibose cytosine
  modified_base 9: mod_base = um
  modified_base 10: mod_base = OTHER; note = 2-fluororibose uracil
  modified_base 11: mod_base = gm
  modified_base 12: mod_base = OTHER; note = 2-O-methylribose adenine
  modified_base 13: mod_base = OTHER; note = 2-O-methylribose adenine
  modified_base 14: mod_base = OTHER; note = 2-fluororibose cytosine
  modified_base 15: mod_base = OTHER; note = 2-O-methylribose adenine
  modified_base 16: mod_base = OTHER; note = 2-fluororibose guanine
  modified_base 17: mod_base = um
  modified_base 18: mod_base = OTHER; note = 2-fluororibose cytosine
  modified_base 19: mod_base = um
  modified_base 19..20: mod_base = OTHER; note = phosphorothioate
  modified_base 20: mod_base = um
  modified_base 20..21: mod_base = OTHER; note = phosphorothioate
  modified_base 21: mod_base = um
  source 1..21: mol_type = other RNA
tatgctacttgaacagtcttt

SEQ ID NO: 172 - RNA, 21 nt, synthetic construct
  misc_feature 1..21: note = Synthetic: WV-38398
  misc_feature 1..21: note = Synthetic: SSR-0103729
  modified_base 1: mod_base = OTHER; note = 2-fluororibose uracil
  modified_base 1..2: mod_base = OTHER; note = phosphorothioate
  modified_base 2: mod_base = OTHER; note = 2-fluororibose uracil
  modified_base 2..3: mod_base = OTHER; note = phosphorothioate
  modified_base 3: mod_base = gm
  modified_base 4: mod_base = OTHER; note = 2-fluororibose guanine
  modified_base 5: mod_base = OTHER; note = 2-O-methylribose adenine
  modified_base 6: mod_base = OTHER; note = 2-fluororibose adenine
  modified_base 7: mod_base = um
  modified_base 8: mod_base = OTHER; note = 2-fluororibose guanine
  modified_base 9: mod_base = cm
  modified_base 10: mod_base = OTHER; note = 2-fluororibose uracil
  modified_base 11: mod_base = OTHER; note = 2-O-methylribose adenine
  modified_base 12: mod_base = cm
  modified_base 13: mod_base = um
  modified_base 14: mod_base = OTHER; note = 2-fluororibose uracil
  modified_base 15: mod_base = gm
  modified_base 16: mod_base = OTHER; note = 2-fluororibose adenine
  modified_base 17: mod_base = OTHER; note = 2-O-methylribose adenine
  modified_base 18: mod_base = OTHER; note = 2-fluororibose cytosine
  modified_base 19: mod_base = OTHER; note = 2-O-methylribose adenine
  modified_base 19..20: mod_base = OTHER; note = phosphorothioate
  modified_base 20: mod_base = um
  modified_base 20..21: mod_base = OTHER; note = phosphorothioate
  modified_base 21: mod_base = um
  source 1..21: mol_type = other RNA
ttggaatgctacttgaacatt

SEQ ID NO: 173 - RNA, 21 nt, synthetic construct
  misc_feature 1..21: note = Synthetic: WV-38399
  misc_feature 1..21: note = Synthetic: SSR-0103750
  modified_base 1: mod_base = OTHER; note = 2-fluororibose uracil
  modified_base 1..2: mod_base = OTHER; note = phosphorothioate
  modified_base 2: mod_base = OTHER; note = 2-fluororibose uracil
  modified_base 2..3: mod_base = OTHER; note = phosphorothioate
  modified_base 3: mod_base = um
  modified_base 4: mod_base = OTHER; note = 2-fluororibose guanine
  modified_base 5: mod_base = gm
  modified_base 6: mod_base = OTHER; note = 2-fluororibose adenine
  modified_base 7: mod_base = OTHER; note = 2-O-methylribose adenine
  modified_base 8: mod_base = OTHER; note = 2-fluororibose uracil
  modified_base 9: mod_base = gm
  modified_base 10: mod_base = OTHER; note = 2-fluororibose cytosine
  modified_base 11: mod_base = um
  modified_base 12: mod_base = OTHER; note = 2-O-methylribose adenine
  modified_base 13: mod_base = cm
  modified_base 14: mod_base = OTHER; note = 2-fluororibose uracil
  modified_base 15: mod_base = um
  modified_base 16: mod_base = OTHER; note = 2-fluororibose guanine
  modified_base 17: mod_base = OTHER; note = 2-O-methylribose adenine
  modified_base 18: mod_base = OTHER; note = 2-fluororibose adenine
  modified_base 19: mod_base = cm
  modified_base 19..20: mod_base = OTHER; note = phosphorothioate
  modified_base 20: mod_base = um
  modified_base 20..21: mod_base = OTHER; note = phosphorothioate
  modified_base 21: mod_base = um
  source 1..21: mol_type = other RNA
tttggaatgctacttgaactt

SEQ ID NO: 174 - RNA, 21 nt, synthetic construct
  misc_feature 1..21: note = Synthetic: WV-38400
  misc_feature 1..21: note = Synthetic: SSR-0103586
  modified_base 1: mod_base = OTHER; note = 2-fluororibose uracil
  modified_base 1..2: mod_base = OTHER; note = phosphorothioate
  modified_base 2: mod_base = OTHER; note = 2-fluororibose adenine
  modified_base 2..3: mod_base = OTHER; note = phosphorothioate
  modified_base 3: mod_base = cm
  modified_base 4: mod_base = OTHER; note = 2-fluororibose adenine
  modified_base 5: mod_base = gm
  modified_base 6: mod_base = OTHER; note = 2-fluororibose adenine
  modified_base 7: mod_base = um
  modified_base 8: mod_base = OTHER; note = 2-fluororibose uracil
  modified_base 9: mod_base = gm
  modified_base 10: mod_base = OTHER; note = 2-fluororibose guanine
  modified_base 11: mod_base = OTHER; note = 2-O-methylribose adenine
  modified_base 12: mod_base = OTHER; note = 2-O-methylribose adenine
  modified_base 13: mod_base = um
  modified_base 14: mod_base = OTHER; note = 2-fluororibose guanine
  modified_base 15: mod_base = cm
  modified_base 16: mod_base = OTHER; note = 2-fluororibose uracil
  modified_base 17: mod_base = OTHER; note = 2-O-methylribose adenine
  modified_base 18: mod_base = OTHER; note = 2-fluororibose cytosine
  modified_base 19: mod_base = um
  modified_base 19..20: mod_base = OTHER; note = phosphorothioate
  modified_base 20: mod_base = um
  modified_base 20..21: mod_base = OTHER; note = phosphorothioate
  modified_base 21: mod_base = um
  source 1..21: mol_type = other RNA
tacagattggaatgctacttt

SEQ ID NO: 175 - RNA, 21 nt, synthetic construct
  misc_feature 1..21: note = Synthetic: WV-38401
  misc_feature 1..21: note = Synthetic: SSR-0103659
  modified_base 1: mod_base = OTHER; note = 2-fluororibose uracil
  modified_base 1..2: mod_base = OTHER; note = phosphorothioate
  modified_base 2: mod_base = OTHER; note = 2-fluororibose cytosine
  modified_base 2..3: mod_base = OTHER; note = phosphorothioate
  modified_base 3: mod_base = um
  modified_base 4: mod_base = OTHER; note = 2-fluororibose uracil
  modified_base 5: mod_base = gm
  modified_base 6: mod_base = OTHER; note = 2-fluororibose uracil
  modified_base 7: mod_base = um
  modified_base 8: mod_base = OTHER; note = 2-fluororibose guanine
  modified_base 9: mod_base = OTHER; note = 2-O-methylribose adenine
  modified_base 10: mod_base = OTHER; note = 2-fluororibose uracil
  modified_base 11: mod_base = OTHER; note = 2-O-methylribose adenine
  modified_base 12: mod_base = um
  modified_base 13: mod_base = um
  modified_base 14: mod_base = OTHER; note = 2-fluororibose cytosine
  modified_base 15: mod_base = um
  modified_base 16: mod_base = OTHER; note = 2-fluororibose guanine
  modified_base 17: mod_base = um
  modified_base 18: mod_base = OTHER; note = 2-fluororibose guanine
  modified_base 19: mod_base = gm
  modified_base 19..20: mod_base = OTHER; note = phosphorothioate
  modified_base 20: mod_base = um
  modified_base 20..21: mod_base = OTHER; note = phosphorothioate
  modified_base 21: mod_base = um
  source 1..21: mol_type = other RNA
tcttgttgatattctgtggtt

SEQ ID NO: 176 - RNA, 21 nt, synthetic construct
  misc_feature 1..21: note = Synthetic: WV-38402
  misc_feature 1..21: note = Synthetic: SSR-0103721
  modified_base 1: mod_base = OTHER; note = 2-fluororibose uracil
  modified_base 1..2: mod_base = OTHER; note = phosphorothioate
  modified_base 2: mod_base = OTHER; note = 2-fluororibose uracil
  modified_base 2..3: mod_base = OTHER; note = phosphorothioate
  modified_base 3: mod_base = cm
  modified_base 4: mod_base = OTHER; note = 2-fluororibose uracil
  modified_base 5: mod_base = um
  modified_base 6: mod_base = OTHER; note = 2-fluororibose guanine
  modified_base 7: mod_base = um
  modified_base 8: mod_base = OTHER; note = 2-fluororibose uracil
  modified_base 9: mod_base = gm
  modified_base 10: mod_base = OTHER; note = 2-fluororibose adenine
  modified_base 11: mod_base = um
  modified_base 12: mod_base = OTHER; note = 2-O-methylribose adenine
  modified_base 13: mod_base = um
  modified_base 14: mod_base = OTHER; note = 2-fluororibose uracil
  modified_base 15: mod_base = cm
  modified_base 16: mod_base = OTHER; note = 2-fluororibose uracil
  modified_base 17: mod_base = gm
  modified_base 18: mod_base = OTHER; note = 2-fluororibose uracil
  modified_base 19: mod_base = gm
  modified_base 19..20: mod_base = OTHER; note = phosphorothioate
  modified_base 20: mod_base = um
  modified_base 20..21: mod_base = OTHER; note = phosphorothioate
  modified_base 21: mod_base = um
  source 1..21: mol_type = other RNA
ttcttgttgatattctgtgtt

SEQ ID NO: 177 - RNA, 21 nt, synthetic construct
  misc_feature 1..21: note = Synthetic: WV-38403
  misc_feature 1..21: note = Synthetic: SSR-0103690
  modified_base 1: mod_base = OTHER; note = 2-fluororibose uracil
  modified_base 1..2: mod_base = OTHER; note = phosphorothioate
  modified_base 2: mod_base = OTHER; note = 2-fluororibose guanine
  modified_base 2..3: mod_base = OTHER; note = phosphorothioate
  modified_base 3: mod_base = um
  modified_base 4: mod_base = OTHER; note = 2-fluororibose uracil
  modified_base 5: mod_base = cm
  modified_base 6: mod_base = OTHER; note = 2-fluororibose uracil
  modified_base 7: mod_base = um
  modified_base 8: mod_base = OTHER; note = 2-fluororibose guanine
  modified_base 9: mod_base = um
  modified_base 10: mod_base = OTHER; note = 2-fluororibose uracil
  modified_base 11: mod_base = gm
  modified_base 12: mod_base = OTHER; note = 2-O-methylribose adenine
  modified_base 13: mod_base = um
  modified_base 14: mod_base = OTHER; note = 2-fluororibose adenine
  modified_base 15: mod_base = um
  modified_base 16: mod_base = OTHER; note = 2-fluororibose uracil
  modified_base 17: mod_base = cm
  modified_base 18: mod_base = OTHER; note = 2-fluororibose uracil
  modified_base 19: mod_base = gm
  modified_base 19..20: mod_base = OTHER; note = phosphorothioate
  modified_base 20: mod_base = um
  modified_base 20..21: mod_base = OTHER; note = phosphorothioate
  modified_base 21: mod_base = um
  source 1..21: mol_type = other RNA
tgttcttgttgatattctgtt

SEQ ID NO: 178 - RNA, 21 nt, synthetic construct
  misc_feature 1..21: note = Synthetic: WV-38404
  misc_feature 1..21: note = Synthetic: SSR-0103688
  modified_base 1: mod_base = OTHER; note = 2-fluororibose uracil
  modified_base 1..2: mod_base = OTHER; note = phosphorothioate
  modified_base 2: mod_base = OTHER; note = 2-fluororibose guanine
  modified_base 2..3: mod_base = OTHER; note = phosphorothioate
  modified_base 3: mod_base = um
  modified_base 4: mod_base = OTHER; note = 2-fluororibose guanine
  modified_base 5: mod_base = um
  modified_base 6: mod_base = OTHER; note = 2-fluororibose uracil
  modified_base 7: mod_base = cm
  modified_base 8: mod_base = OTHER; note = 2-fluororibose uracil
  modified_base 9: mod_base = um
  modified_base 10: mod_base = OTHER; note = 2-fluororibose guanine
  modified_base 11: mod_base = um
  modified_base 12: mod_base = um
  modified_base 13: mod_base = gm
  modified_base 14: mod_base = OTHER; note = 2-fluororibose adenine
  modified_base 15: mod_base = um
  modified_base 16: mod_base = OTHER; note = 2-fluororibose adenine
  modified_base 17: mod_base = um
  modified_base 18: mod_base = OTHER; note = 2-fluororibose uracil
  modified_base 19: mod_base = cm
  modified_base 19..20: mod_base = OTHER; note = phosphorothioate
  modified_base 20: mod_base = um
  modified_base 20..21: mod_base = OTHER; note = phosphorothioate
  modified_base 21: mod_base = um
  source 1..21: mol_type = other RNA
tgtgttcttgttgatattctt

SEQ ID NO: 179 - RNA, 21 nt, synthetic construct
  misc_feature 1..21: note = Synthetic: WV-38405
  misc_feature 1..21: note = Synthetic: SSR-0103637
  modified_base 1: mod_base = OTHER; note = 2-fluororibose uracil
  modified_base 1..2: mod_base = OTHER; note = phosphorothioate
  modified_base 2: mod_base = OTHER; note = 2-fluororibose cytosine
  modified_base 2..3: mod_base = OTHER; note = phosphorothioate
  modified_base 3: mod_base = OTHER; note = 2-O-methylribose adenine
  modified_base 4: mod_base = OTHER; note = 2-fluororibose uracil
  modified_base 5: mod_base = um
  modified_base 6: mod_base = OTHER; note = 2-fluororibose cytosine
  modified_base 7: mod_base = um
  modified_base 8: mod_base = OTHER; note = 2-fluororibose guanine
  modified_base 9: mod_base = um
  modified_base 10: mod_base = OTHER; note = 2-fluororibose guanine
  modified_base 11: mod_base = um
  modified_base 12: mod_base = um
  modified_base 13: mod_base = cm
  modified_base 14: mod_base = OTHER; note = 2-fluororibose uracil
  modified_base 15: mod_base = um
  modified_base 16: mod_base = OTHER; note = 2-fluororibose guanine
  modified_base 17: mod_base = um
  modified_base 18: mod_base = OTHER; note = 2-fluororibose uracil
  modified_base 19: mod_base = gm
  modified_base 19..20: mod_base = OTHER; note = phosphorothioate
  modified_base 20: mod_base = um
  modified_base 20..21: mod_base = OTHER; note = phosphorothioate
  modified_base 21: mod_base = um
  source 1..21: mol_type = other RNA
tcattctgtgttcttgttgtt

SEQ ID NO: 180 - RNA, 21 nt, synthetic construct
  misc_feature 1..21: note = Synthetic: WV-38406
  misc_feature 1..21: note = Synthetic: SSR-0103600
  modified_base 1: mod_base = OTHER; note = 2-fluororibose uracil
  modified_base 1..2: mod_base = OTHER; note = phosphorothioate
  modified_base 2: mod_base = OTHER; note = 2-fluororibose adenine
  modified_base 2..3: mod_base = OTHER; note = phosphorothioate
  modified_base 3: mod_base = gm
  modified_base 4: mod_base = OTHER; note = 2-fluororibose cytosine
  modified_base 5: mod_base = um
  modified_base 6: mod_base = OTHER; note = 2-fluororibose guanine
  modified_base 7: mod_base = um
  modified_base 8: mod_base = OTHER; note = 2-fluororibose guanine
  modified_base 9: mod_base = cm
  modified_base 10: mod_base = OTHER; note = 2-fluororibose adenine
  modified_base 11: mod_base = cm
  modified_base 12: mod_base = um
  modified_base 13: mod_base = cm
  modified_base 14: mod_base = OTHER; note = 2-fluororibose adenine
  modified_base 15: mod_base = um
  modified_base 16: mod_base = OTHER; note = 2-fluororibose uracil
  modified_base 17: mod_base = cm
  modified_base 18: mod_base = OTHER; note = 2-fluororibose uracil
  modified_base 19: mod_base = gm
  modified_base 19..20: mod_base = OTHER; note = phosphorothioate
  modified_base 20: mod_base = um
  modified_base 20..21: mod_base = OTHER; note = phosphorothioate
  modified_base 21: mod_base = um
  source 1..21: mol_type = other RNA
tagctgtgcactcattctgtt

SEQ ID NO: 181 - RNA, 21 nt, synthetic construct
  misc_feature 1..21: note = Synthetic: WV-38407
  misc_feature 1..21: note = Synthetic: SSR-0103699
  modified_base 1: mod_base = OTHER; note = 2-fluororibose uracil
  modified_base 1..2: mod_base = OTHER; note = phosphorothioate
  modified_base 2: mod_base = OTHER; note = 2-fluororibose uracil
  modified_base 2..3: mod_base = OTHER; note = phosphorothioate
  modified_base 3: mod_base = OTHER; note = 2-O-methylribose adenine
  modified_base 4: mod_base = OTHER; note = 2-fluororibose guanine
  modified_base 5: mod_base = cm
  modified_base 6: mod_base = OTHER; note = 2-fluororibose uracil
  modified_base 7: mod_base = gm
  modified_base 8: mod_base = OTHER; note = 2-fluororibose uracil
  modified_base 9: mod_base = gm
  modified_base 10: mod_base = OTHER; note = 2-fluororibose cytosine
  modified_base 11: mod_base = OTHER; note = 2-O-methylribose adenine
  modified_base 12: mod_base = cm
  modified_base 13: mod_base = um
  modified_base 14: mod_base = OTHER; note = 2-fluororibose cytosine
  modified_base 15: mod_base = OTHER; note = 2-O-methylribose adenine
  modified_base 16: mod_base = OTHER; note = 2-fluororibose uracil
  modified_base 17: mod_base = um
  modified_base 18: mod_base = OTHER; note = 2-fluororibose cytosine
  modified_base 19: mod_base = um
  modified_base 19..20: mod_base = OTHER; note = phosphorothioate
  modified_base 20: mod_base = um
  modified_base 20..21: mod_base = OTHER; note = phosphorothioate
  modified_base 21: mod_base = um
  source 1..21: mol_type = other RNA
ttagctgtgcactcattcttt

SEQ ID NO: 182 - RNA, 21 nt, synthetic construct
  misc_feature 1..21: note = Synthetic: WV-38408
  misc_feature 1..21: note = Synthetic: SSR-0103607
  modified_base 1: mod_base = OTHER; note = 2-fluororibose uracil
  modified_base 1..2: mod_base = OTHER; note = phosphorothioate
  modified_base 2: mod_base = OTHER; note = 2-fluororibose adenine
  modified_base 2..3: mod_base = OTHER; note = phosphorothioate
  modified_base 3: mod_base = gm
  modified_base 4: mod_base = OTHER; note = 2-fluororibose guanine
  modified_base 5: mod_base = gm
  modified_base 6: mod_base = OTHER; note = 2-fluororibose adenine
  modified_base 7: mod_base = OTHER; note = 2-O-methylribose adenine
  modified_base 8: mod_base = OTHER; note = 2-fluororibose adenine
  modified_base 9: mod_base = um
  modified_base 10: mod_base = OTHER; note = 2-fluororibose cytosine
  modified_base 11: mod_base = um
  modified_base 12: mod_base = um
  modified_base 13: mod_base = um
  modified_base 14: mod_base = OTHER; note = 2-fluororibose cytosine
  modified_base 15: mod_base = OTHER; note = 2-O-methylribose adenine
  modified_base 16: mod_base = OTHER; note = 2-fluororibose adenine
  modified_base 17: mod_base = OTHER; note = 2-O-methylribose adenine
  modified_base 18: mod_base = OTHER; note = 2-fluororibose uracil
  modified_base 19: mod_base = gm
  modified_base 19..20: mod_base = OTHER; note = phosphorothioate
  modified_base 20: mod_base = um
  modified_base 20..21: mod_base = OTHER; note = phosphorothioate
  modified_base 21: mod_base = um
  source 1..21: mol_type = other RNA
tagggaaatctttcaaatgtt

SEQ ID NO: 183 - RNA, 21 nt, synthetic construct
  misc_feature 1..21: note = Synthetic: WV-38409
  misc_feature 1..21: note = Synthetic: SSR-0103596
  modified_base 1: mod_base = OTHER; note = 2-fluororibose uracil
  modified_base 1..2: mod_base = OTHER; note = phosphorothioate
  modified_base 2: mod_base = OTHER; note = 2-fluororibose adenine
  modified_base 2..3: mod_base = OTHER; note = phosphorothioate
  modified_base 3: mod_base = gm
  modified_base 4: mod_base = OTHER; note = 2-fluororibose adenine
  modified_base 5: mod_base = gm
  modified_base 6: mod_base = OTHER; note = 2-fluororibose uracil
  modified_base 7: mod_base = um
  modified_base 8: mod_base = OTHER; note = 2-fluororibose guanine
  modified_base 9: mod_base = cm
  modified_base 10: mod_base = OTHER; note = 2-fluororibose adenine
  modified_base 11: mod_base = cm
  modified_base 12: mod_base = cm
  modified_base 13: mod_base = gm
  modified_base 14: mod_base = OTHER; note = 2-fluororibose uracil
  modified_base 15: mod_base = um
  modified_base 16: mod_base = OTHER; note = 2-fluororibose uracil
  modified_base 17: mod_base = um
  modified_base 18: mod_base = OTHER; note = 2-fluororibose guanine
  modified_base 19: mod_base = gm
  modified_base 19..20: mod_base = OTHER; note = phosphorothioate
  modified_base 20: mod_base = um
  modified_base 20..21: mod_base = OTHER; note = phosphorothioate
  modified_base 21: mod_base = um
  source 1..21: mol_type = other RNA
tagagttgcaccgttttggtt

SEQ ID NO: 184 - RNA, 21 nt, synthetic construct
  misc_feature 1..21: note = Synthetic: WV-38410
  misc_feature 1..21: note = Synthetic: SSR-0103641
  modified_base 1: mod_base = OTHER; note = 2-fluororibose uracil
  modified_base 1..2: mod_base = OTHER; note = phosphorothioate
  modified_base 2: mod_base = OTHER; note = 2-fluororibose cytosine
  modified_base 2..3: mod_base = OTHER; note = phosphorothioate
  modified_base 3: mod_base = cm
  modified_base 4: mod_base = OTHER; note = 2-fluororibose adenine
  modified_base 5: mod_base = gm
  modified_base 6: mod_base = OTHER; note = 2-fluororibose adenine
  modified_base 7: mod_base = OTHER; note = 2-O-methylribose adenine
  modified_base 8: mod_base = OTHER; note = 2-fluororibose uracil
  modified_base 9: mod_base = OTHER; note = 2-O-methylribose adenine
  modified_base 10: mod_base = OTHER; note = 2-fluororibose guanine
  modified_base 11: mod_base = OTHER; note = 2-O-methylribose adenine
  modified_base 12: mod_base = gm
  modified_base 13: mod_base = um
  modified_base 14: mod_base = OTHER; note = 2-fluororibose uracil
  modified_base 15: mod_base = gm
  modified_base 16: mod_base = OTHER; note = 2-fluororibose cytosine
  modified_base 17: mod_base = OTHER; note = 2-O-methylribose adenine
  modified_base 18: mod_base = OTHER; note = 2-fluororibose cytosine
  modified_base 19: mod_base = cm
  modified_base 19..20: mod_base = OTHER; note = phosphorothioate
  modified_base 20: mod_base = um
  modified_base 20..21: mod_base = OTHER; note = phosphorothioate
  modified_base 21: mod_base = um
  source 1..21: mol_type = other RNA
tccagaatagagttgcacctt

SEQ ID NO: 185 - RNA, 21 nt, synthetic construct
  misc_feature 1..21: note = Synthetic: WV-38411
  misc_feature 1..21: note = Synthetic: SSR-0103611
  modified_base 1: mod_base = OTHER; note = 2-fluororibose uracil
  modified_base 1..2: mod_base = OTHER; note = phosphorothioate
  modified_base 2: mod_base = OTHER; note = 2-fluororibose adenine
  modified_base 2..3: mod_base = OTHER; note = phosphorothioate
  modified_base 3: mod_base = gm
  modified_base 4: mod_base = OTHER; note = 2-fluororibose uracil
  modified_base 5: mod_base = cm
  modified_base 6: mod_base = OTHER; note = 2-fluororibose cytosine
  modified_base 7: mod_base = OTHER; note = 2-O-methylribose adenine
  modified_base 8: mod_base = OTHER; note = 2-fluororibose guanine
  modified_base 9: mod_base = OTHER; note = 2-O-methylribose adenine
  modified_base 10: mod_base = OTHER; note = 2-fluororibose adenine
  modified_base 11: mod_base = um
  modified_base 12: mod_base = OTHER; note = 2-O-methylribose adenine
  modified_base 13: mod_base = gm
  modified_base 14: mod_base = OTHER; note = 2-fluororibose adenine
  modified_base 15: mod_base = gm
  modified_base 16: mod_base = OTHER; note = 2-fluororibose uracil
  modified_base 17: mod_base = um
  modified_base 18: mod_base = OTHER; note = 2-fluororibose guanine
  modified_base 19: mod_base = cm
  modified_base 19..20: mod_base = OTHER; note = phosphorothioate
  modified_base 20: mod_base = um
  modified_base 20..21: mod_base = OTHER; note = phosphorothioate
  modified_base 21: mod_base = um
  source 1..21: mol_type = other RNA
tagtccagaatagagttgctt

SEQ ID NO: 186 - RNA, 21 nt, synthetic construct
  misc_feature 1..21: note = Synthetic: WV-38412
  misc_feature 1..21: note = Synthetic: SSR-0103746
  modified_base 1: mod_base = OTHER; note = 2-fluororibose uracil
  modified_base 1..2: mod_base = OTHER; note = phosphorothioate
  modified_base 2: mod_base = OTHER; note = 2-fluororibose uracil
  modified_base 2..3: mod_base = OTHER; note = phosphorothioate
  modified_base 3: mod_base = um
  modified_base 4: mod_base = OTHER; note = 2-fluororibose guanine
  modified_base 5: mod_base = OTHER; note = 2-O-methylribose adenine
  modified_base 6: mod_base = OTHER; note = 2-fluororibose guanine
  modified_base 7: mod_base = cm
  modified_base 8: mod_base = OTHER; note = 2-fluororibose cytosine
  modified_base 9: mod_base = um
  modified_base 10: mod_base = OTHER; note = 2-fluororibose adenine
  modified_base 11: mod_base = OTHER; note = 2-O-methylribose adenine
  modified_base 12: mod_base = OTHER; note = 2-O-methylribose adenine
  modified_base 13: mod_base = OTHER; note = 2-O-methylribose adenine
  modified_base 14: mod_base = OTHER; note = 2-fluororibose uracil
  modified_base 15: mod_base = um
  modified_base 16: mod_base = OTHER; note = 2-fluororibose guanine
  modified_base 17: mod_base = um
  modified_base 18: mod_base = OTHER; note = 2-fluororibose cytosine
  modified_base 19: mod_base = um
  modified_base 19..20: mod_base = OTHER; note = phosphorothioate
  modified_base 20: mod_base = um
  modified_base 20..21: mod_base = OTHER; note = phosphorothioate
  modified_base 21: mod_base = um
  source 1..21: mol_type = other RNA
tttgagcctaaaattgtcttt

SEQ ID NO: 187 - RNA, 21 nt, synthetic construct
  misc_feature 1..21: note = Synthetic: WV-38413
  misc_feature 1..21: note = Synthetic: SSR-0103759
  modified_base 1: mod_base = OTHER; note = 2-fluororibose uracil
  modified_base 1..2: mod_base = OTHER; note = phosphorothioate
  modified_base 2: mod_base = OTHER; note = 2-fluororibose uracil
  modified_base 2..3: mod_base = OTHER; note = phosphorothioate
  modified_base 3: mod_base = um
  modified_base 4: mod_base = OTHER; note = 2-fluororibose uracil
  modified_base 5: mod_base = gm
  modified_base 6: mod_base = OTHER; note = 2-fluororibose adenine
  modified_base 7: mod_base = gm
  modified_base 8: mod_base = OTHER; note = 2-fluororibose cytosine
  modified_base 9: mod_base = cm
  modified_base 10: mod_base = OTHER; note = 2-fluororibose uracil
  modified_base 11: mod_base = OTHER; note = 2-O-methylribose adenine
  modified_base 12: mod_base = OTHER; note = 2-O-methylribose adenine
  modified_base 13: mod_base = OTHER; note = 2-O-methylribose adenine
  modified_base 14: mod_base = OTHER; note = 2-fluororibose adenine
  modified_base 15: mod_base = um
  modified_base 16: mod_base = OTHER; note = 2-fluororibose uracil
  modified_base 17: mod_base = gm
  modified_base 18: mod_base = OTHER; note = 2-fluororibose uracil
  modified_base 19: mod_base = cm
  modified_base 19..20: mod_base = OTHER; note = phosphorothioate
  modified_base 20: mod_base = um
  modified_base 20..21: mod_base = OTHER; note = phosphorothioate
  modified_base 21: mod_base = um
  source 1..21: mol_type = other RNA
ttttgagcctaaaattgtctt

SEQ ID NO: 188 - RNA, 21 nt, synthetic construct
  misc_feature 1..21: note = Synthetic: WV-38414
  misc_feature 1..21: note = Synthetic: SSR-0103601
  modified_base 1: mod_base = OTHER; note = 2-fluororibose uracil
  modified_base 1..2: mod_base = OTHER; note = phosphorothioate
  modified_base 2: mod_base = OTHER; note = 2-fluororibose adenine
  modified_base 2..3: mod_base = OTHER; note = phosphorothioate
  modified_base 3: mod_base = gm
  modified_base 4: mod_base = OTHER; note = 2-fluororibose cytosine
  modified_base 5: mod_base = um
  modified_base 6: mod_base = OTHER; note = 2-fluororibose uracil
  modified_base 7: mod_base = um
  modified_base 8: mod_base = OTHER; note = 2-fluororibose adenine
  modified_base 9: mod_base = OTHER; note = 2-O-methylribose adenine
  modified_base 10: mod_base = OTHER; note = 2-fluororibose uracil
  modified_base 11: mod_base = um
  modified_base 12: mod_base = um
  modified_base 13: mod_base = um
  modified_base 14: mod_base = OTHER; note = 2-fluororibose uracil
  modified_base 15: mod_base = gm
  modified_base 16: mod_base = OTHER; note = 2-fluororibose adenine
  modified_base 17: mod_base = gm
  modified_base 18: mod_base = OTHER; note = 2-fluororibose cytosine
  modified_base 19: mod_base = cm
  modified_base 19..20: mod_base = OTHER; note = phosphorothioate
  modified_base 20: mod_base = um
  modified_base 20..21: mod_base = OTHER; note = phosphorothioate
  modified_base 21: mod_base = um
  source 1..21: mol_type = other RNA
tagctttaatttttgagcctt

SEQ ID NO: 189 - RNA, 21 nt, synthetic construct
  misc_feature 1..21: note = Synthetic: WV-38415
  misc_feature 1..21: note = Synthetic: SSR-0103700
  modified_base 1: mod_base = OTHER; note = 2-fluororibose uracil
  modified_base 1..2: mod_base = OTHER; note = phosphorothioate
  modified_base 2: mod_base = OTHER; note = 2-fluororibose uracil
  modified_base 2..3: mod_base = OTHER; note = phosphorothioate
  modified_base 3: mod_base = OTHER; note = 2-O-methylribose adenine
  modified_base 4: mod_base = OTHER; note = 2-fluororibose guanine
  modified_base 5: mod_base = cm
  modified_base 6: mod_base = OTHER; note = 2-fluororibose uracil
  modified_base 7: mod_base = um
  modified_base 8: mod_base = OTHER; note = 2-fluororibose uracil
  modified_base 9: mod_base = OTHER; note = 2-O-methylribose adenine
  modified_base 10: mod_base = OTHER; note = 2-fluororibose adenine
  modified_base 11: mod_base = um
  modified_base 12: mod_base = um
  modified_base 13: mod_base = um
  modified_base 14: mod_base = OTHER; note = 2-fluororibose uracil
  modified_base 15: mod_base = um
  modified_base 16: mod_base = OTHER; note = 2-fluororibose guanine
  modified_base 17: mod_base = OTHER; note = 2-O-methylribose adenine
  modified_base 18: mod_base = OTHER; note = 2-fluororibose guanine
  modified_base 19: mod_base = cm
  modified_base 19..20: mod_base = OTHER; note = phosphorothioate
  modified_base 20: mod_base = um
  modified_base 20..21: mod_base = OTHER; note = phosphorothioate
  modified_base 21: mod_base = um
  source 1..21: mol_type = other RNA
ttagctttaatttttgagctt

SEQ ID NO: 190 - RNA, 21 nt, synthetic construct
  misc_feature 1..21: note = Synthetic: WV-38416
  misc_feature 1..21: note = Synthetic: SSR-0103711
  modified_base 1: mod_base = OTHER; note = 2-fluororibose uracil
  modified_base 1..2: mod_base = OTHER; note = phosphorothioate
  modified_base 2: mod_base = OTHER; note = 2-fluororibose uracil
  modified_base 2..3: mod_base = OTHER; note = phosphorothioate
  modified_base 3: mod_base = cm
  modified_base 4: mod_base = OTHER; note = 2-fluororibose cytosine
  modified_base 5: mod_base = um
  modified_base 6: mod_base = OTHER; note = 2-fluororibose uracil
  modified_base 7: mod_base = um
  modified_base 8: mod_base = OTHER; note = 2-fluororibose uracil
  modified_base 9: mod_base = cm
  modified_base 10: mod_base = OTHER; note = 2-fluororibose cytosine
  modified_base 11: mod_base = um
  modified_base 12: mod_base = gm
  modified_base 13: mod_base = um
  modified_base 14: mod_base = OTHER; note = 2-fluororibose guanine
  modified_base 15: mod_base = um
  modified_base 16: mod_base = OTHER; note = 2-fluororibose uracil
  modified_base 17: mod_base = OTHER; note = 2-O-methylribose adenine
  modified_base 18: mod_base = OTHER; note = 2-fluororibose guanine
  modified_base 19: mod_base = cm
  modified_base 19..20: mod_base = OTHER; note = phosphorothioate
  modified_base 20: mod_base = um
  modified_base 20..21: mod_base = OTHER; note = phosphorothioate
  modified_base 21: mod_base = um
  source 1..21: mol_type = other RNA
ttccttttcctgtgttagctt

SEQ ID NO: 191 - RNA, 21 nt, synthetic construct
  misc_feature 1..21: note = Synthetic: WV-38417
  misc_feature 1..21: note = Synthetic: SSR-0103581
  modified_base 1: mod_base = OTHER; note = 2-fluororibose uracil
  modified_base 1..2: mod_base = OTHER; note = phosphorothioate
  modified_base 2: mod_base = OTHER; note = 2-fluororibose adenine
  modified_base 2..3: mod_base = OTHER; note = phosphorothioate
  modified_base 3: mod_base = OTHER; note = 2-O-methylribose adenine
  modified_base 4: mod_base = OTHER; note = 2-fluororibose uracil
  modified_base 5: mod_base = OTHER; note = 2-O-methylribose adenine
  modified_base 6: mod_base = OTHER; note = 2-fluororibose guanine
  modified_base 7: mod_base = cm
  modified_base 8: mod_base = OTHER; note = 2-fluororibose cytosine
  modified_base 9: mod_base = OTHER; note = 2-O-methylribose adenine
  modified_base 10: mod_base = OTHER; note = 2-fluororibose guanine
  modified_base 11: mod_base = um
  modified_base 12: mod_base = OTHER; note = 2-O-methylribose adenine
  modified_base 13: mod_base = cm
  modified_base 14: mod_base = OTHER; note = 2-fluororibose adenine
  modified_base 15: mod_base = gm
  modified_base 16: mod_base = OTHER; note = 2-fluororibose uracil
  modified_base 17: mod_base = um
  modified_base 18: mod_base = OTHER; note = 2-fluororibose cytosine
  modified_base 19: mod_base = cm
  modified_base 19..20: mod_base = OTHER; note = phosphorothioate
  modified_base 20: mod_base = um
  modified_base 20..21: mod_base = OTHER; note = phosphorothioate
  modified_base 21: mod_base = um
  source 1..21: mol_type = other RNA
taatagccagtacagttcctt

SEQ ID NO: 192 - RNA, 21 nt, synthetic construct
  misc_feature 1..21: note = Synthetic: WV-38418
  misc_feature 1..21: note = Synthetic: SSR-0103702
  modified_base 1: mod_base = OTHER; note = 2-fluororibose uracil
  modified_base 1..2: mod_base = OTHER; note = phosphorothioate
  modified_base 2: mod_base = OTHER; note = 2-fluororibose uracil
  modified_base 2..3: mod_base = OTHER; note = phosphorothioate
  modified_base 3: mod_base = OTHER; note = 2-O-methylribose adenine
  modified_base 4: mod_base = OTHER; note = 2-fluororibose guanine
  modified_base 5: mod_base = um
  modified_base 6: mod_base = OTHER; note = 2-fluororibose cytosine
  modified_base 7: mod_base = um
  modified_base 8: mod_base = OTHER; note = 2-fluororibose uracil
  modified_base 9: mod_base = gm
  modified_base 10: mod_base = OTHER; note = 2-fluororibose adenine
  modified_base 11: mod_base = um
  modified_base 12: mod_base = gm
  modified_base 13: mod_base = um
  modified_base 14: mod_base = OTHER; note = 2-fluororibose adenine
  modified_base 15: mod_base = gm
  modified_base 16: mod_base = OTHER; note = 2-fluororibose uracil
  modified_base 17: mod_base = gm
  modified_base 18: mod_base = OTHER; note = 2-fluororibose guanine
  modified_base 19: mod_base = gm
  modified_base 19..20: mod_base = OTHER; note = phosphorothioate
  modified_base 20: mod_base = um
  modified_base 20..21: mod_base = OTHER; note = phosphorothioate
  modified_base 21: mod_base = um
  source 1..21: mol_type = other RNA
ttagtcttgatgtagtgggtt

SEQ ID NO: 193 - RNA, 19 nt, synthetic construct
  misc_feature 1..19: note = Synthetic: WV-38419
  misc_feature 1..19: note = Synthetic: SSR-0103787
  modified_base 1: mod_base = OTHER; note = 2-O-methylribose adenine
  modified_base 2: mod_base = cm
  modified_base 3: mod_base = OTHER; note = 2-fluororibose adenine
  modified_base 4: mod_base = cm
  modified_base 5: mod_base = OTHER; note = 2-fluororibose adenine
  modified_base 6: mod_base = OTHER; note = 2-O-methylribose adenine
  modified_base 7: mod_base = OTHER; note = 2-fluororibose guanine
  modified_base 8: mod_base = OTHER; note = 2-fluororibose guanine
  modified_base 9: mod_base = OTHER; note = 2-fluororibose adenine
  modified_base 10: mod_base = cm
  modified_base 11: mod_base = OTHER; note = 2-fluororibose uracil
  modified_base 12: mod_base = gm
  modified_base 13: mod_base = OTHER; note = 2-fluororibose adenine
  modified_base 14: mod_base = OTHER; note = 2-O-methylribose adenine
  modified_base 15: mod_base = OTHER; note = 2-fluororibose cytosine
  modified_base 16: mod_base = cm
  modified_base 17: mod_base = OTHER; note = 2-fluororibose adenine
  modified_base 18: mod_base = gm
  modified_base 19: mod_base = OTHER; note = 2-fluororibose adenine
  source 1..19: mol_type = other RNA
acacaaggactgaaccaga

SEQ ID NO: 194 - RNA, 19 nt, synthetic construct
  misc_feature 1..19: note = Synthetic: WV-38420
  misc_feature 1..19: note = Synthetic: SSR-0103827
  modified_base 1: mod_base = cm
  modified_base 2: mod_base = OTHER; note = 2-O-methylribose adenine
  modified_base 3: mod_base = OTHER; note = 2-fluororibose cytosine
  modified_base 4: mod_base = OTHER; note = 2-O-methylribose adenine
  modified_base 5: mod_base = OTHER; note = 2-fluororibose adenine
  modified_base 6: mod_base = gm
  modified_base 7: mod_base = OTHER; note = 2-fluororibose guanine
  modified_base 8: mod_base = OTHER; note = 2-fluororibose adenine
  modified_base 9: mod_base = OTHER; note = 2-fluororibose cytosine
  modified_base 10: mod_base = um
  modified_base 11: mod_base = OTHER; note = 2-fluororibose guanine
  modified_base 12: mod_base = OTHER; note = 2-O-methylribose adenine
  modified_base 13: mod_base = OTHER; note = 2-fluororibose adenine
  modified_base 14: mod_base = cm
  modified_base 15: mod_base = OTHER; note = 2-fluororibose cytosine
  modified_base 16: mod_base = OTHER; note = 2-O-methylribose adenine
  modified_base 17: mod_base = OTHER; note = 2-fluororibose guanine
  modified_base 18: mod_base = OTHER; note = 2-O-methylribose adenine
  modified_base 19: mod_base = OTHER; note = 2-fluororibose adenine
  source 1..19: mol_type = other RNA
cacaaggactgaaccagaa

SEQ ID NO: 195 - RNA, 19 nt, synthetic construct
  misc_feature 1..19: note = Synthetic: WV-38421
  misc_feature 1..19: note = Synthetic: SSR-0103920
  modified_base 1: mod_base = gm
  modified_base 2: mod_base = gm
  modified_base 3: mod_base = OTHER; note = 2-fluororibose adenine
  modified_base 4: mod_base = cm
  modified_base 5: mod_base = OTHER; note = 2-fluororibose uracil
  modified_base 6: mod_base = gm
  modified_base 7: mod_base = OTHER; note = 2-fluororibose adenine
  modified_base 8: mod_base = OTHER; note = 2-fluororibose adenine
  modified_base 9: mod_base = OTHER; note = 2-fluororibose cytosine
  modified_base 10: mod_base = cm
  modified_base 11: mod_base = OTHER; note = 2-fluororibose adenine
  modified_base 12: mod_base = gm
  modified_base 13: mod_base = OTHER; note = 2-fluororibose adenine
  modified_base 14: mod_base = OTHER; note = 2-O-methylribose adenine
  modified_base 15: mod_base = OTHER; note = 2-fluororibose guanine
  modified_base 16: mod_base = gm
  modified_base 17: mod_base = OTHER; note = 2-fluororibose adenine
  modified_base 18: mod_base = OTHER; note = 2-O-methylribose adenine
  modified_base 19: mod_base = OTHER; note = 2-fluororibose adenine
  source 1..19: mol_type = other RNA
ggactgaaccagaaggaaa

SEQ ID NO: 196 - RNA, 19 nt, synthetic construct
  misc_feature 1..19: note = Synthetic: WV-38422
  misc_feature 1..19: note = Synthetic: SSR-0103893
  modified_base 1: mod_base = gm
  modified_base 2: mod_base = OTHER; note = 2-O-methylribose adenine
  modified_base 3: mod_base = OTHER; note = 2-fluororibose cytosine
  modified_base 4: mod_base = um
  modified_base 5: mod_base = OTHER; note = 2-fluororibose guanine
  modified_base 6: mod_base = OTHER; note = 2-O-methylribose adenine
  modified_base 7: mod_base = OTHER; note = 2-fluororibose adenine
  modified_base 8: mod_base = OTHER; note = 2-fluororibose cytosine
  modified_base 9: mod_base = OTHER; note = 2-fluororibose cytosine
  modified_base 10: mod_base = OTHER; note = 2-O-methylribose adenine
  modified_base 11: mod_base = OTHER; note = 2-fluororibose guanine
  modified_base 12: mod_base = OTHER; note = 2-O-methylribose adenine
  modified_base 13: mod_base = OTHER; note = 2-fluororibose adenine
  modified_base 14: mod_base = gm
  modified_base 15: mod_base = OTHER; note = 2-fluororibose guanine
  modified_base 16: mod_base = OTHER; note = 2-O-methylribose adenine
  modified_base 17: mod_base = OTHER; note = 2-fluororibose adenine
  modified_base 18: mod_base = gm
  modified_base 19: mod_base = OTHER; note = 2-fluororibose adenine
  source 1..19: mol_type = other RNA
gactgaaccagaaggaaga

SEQ ID NO: 197 - RNA, 19 nt, synthetic construct
  misc_feature 1..19: note = Synthetic: WV-38423
  misc_feature 1..19: note = Synthetic: SSR-0103845
  modified_base 1: mod_base = cm
  modified_base 2: mod_base = cm
  modified_base 3: mod_base = OTHER; note = 2-fluororibose adenine
  modified_base 4: mod_base = gm
  modified_base 5: mod_base = OTHER; note = 2-fluororibose adenine
  modified_base 6: mod_base = OTHER; note = 2-O-methylribose adenine
  modified_base 7: mod_base = OTHER; note = 2-fluororibose guanine
  modified_base 8: mod_base = OTHER; note = 2-fluororibose guanine
  modified_base 9: mod_base = OTHER; note = 2-fluororibose adenine
  modified_base 10: mod_base = OTHER; note = 2-O-methylribose adenine
  modified_base 11: mod_base = OTHER; note = 2-fluororibose guanine
  modified_base 12: mod_base = OTHER; note = 2-O-methylribose adenine
  modified_base 13: mod_base = OTHER; note = 2-fluororibose guanine
  modified_base 14: mod_base = gm
  modified_base 15: mod_base = OTHER; note = 2-fluororibose adenine
  modified_base 16: mod_base = cm
  modified_base 17: mod_base = OTHER; note = 2-fluororibose adenine
  modified_base 18: mod_base = gm
  modified_base 19: mod_base = OTHER; note = 2-fluororibose adenine
  source 1..19: mol_type = other RNA
ccagaaggaagaggacaga

SEQ ID NO: 198 - RNA, 19 nt, synthetic construct
  misc_feature 1..19: note = Synthetic: WV-38424
  misc_feature 1..19: note = Synthetic: SSR-0103877
  modified_base 1: mod_base = gm
  modified_base 2: mod_base = OTHER; note = 2-O-methylribose adenine
  modified_base 3: mod_base = OTHER; note = 2-fluororibose adenine
  modified_base 4: mod_base = gm
  modified_base 5: mod_base = OTHER; note = 2-fluororibose guanine
  modified_base 6: mod_base = OTHER; note = 2-O-methylribose adenine
  modified_base 7: mod_base = OTHER; note = 2-fluororibose adenine
  modified_base 8: mod_base = OTHER; note = 2-fluororibose guanine
  modified_base 9: mod_base = OTHER; note = 2-fluororibose adenine
  modified_base 10: mod_base = gm
  modified_base 11: mod_base = OTHER; note = 2-fluororibose guanine
  modified_base 12: mod_base = OTHER; note = 2-O-methylribose adenine
  modified_base 13: mod_base = OTHER; note = 2-fluororibose cytosine
  modified_base 14: mod_base = OTHER; note = 2-O-methylribose adenine
  modified_base 15: mod_base = OTHER; note = 2-fluororibose guanine
  modified_base 16: mod_base = OTHER; note = 2-O-methylribose adenine
  modified_base 17: mod_base = OTHER; note = 2-fluororibose guanine
  modified_base 18: mod_base = cm
  modified_base 19: mod_base = OTHER; note = 2-fluororibose adenine
  source 1..19: mol_type = other RNA
gaaggaagaggacagagca

SEQ ID NO: 199 - RNA, 19 nt, synthetic construct
  misc_feature 1..19: note = Synthetic: WV-38425
  misc_feature 1..19: note = Synthetic: SSR-0103805
  modified_base 1: mod_base = OTHER; note = 2-O-methylribose adenine
  modified_base 2: mod_base = gm
  modified_base 3: mod_base = OTHER; note = 2-fluororibose guanine
  modified_base 4: mod_base = OTHER; note = 2-O-methylribose adenine
  modified_base 5: mod_base = OTHER; note = 2-fluororibose adenine
  modified_base 6: mod_base = gm
  modified_base 7: mod_base = OTHER; note = 2-fluororibose adenine
  modified_base 8: mod_base = OTHER; note = 2-fluororibose guanine
  modified_base 9: mod_base = OTHER; note = 2-fluororibose guanine
  modified_base 10: mod_base = OTHER; note = 2-O-methylribose adenine
  modified_base 11: mod_base = OTHER; note = 2-fluororibose cytosine
  modified_base 12: mod_base = OTHER; note = 2-O-methylribose adenine
  modified_base 13: mod_base = OTHER; note = 2-fluororibose guanine
  modified_base 14: mod_base = OTHER; note = 2-O-methylribose adenine
  modified_base 15: mod_base = OTHER; note = 2-fluororibose guanine
  modified_base 16: mod_base = cm
  modified_base 17: mod_base = OTHER; note = 2-fluororibose adenine
  modified_base 18: mod_base = OTHER; note = 2-O-methylribose adenine
  modified_base 19: mod_base = OTHER; note = 2-fluororibose adenine
  source 1..19: mol_type = other RNA
aggaagaggacagagcaaa

SEQ ID NO: 200 - RNA, 19 nt, synthetic construct
  misc_feature 1..19: note = Synthetic: WV-38426
  misc_feature 1..19: note = Synthetic: SSR-0103914
  modified_base 1: mod_base = gm
  modified_base 2: mod_base = gm
  modified_base 3: mod_base = OTHER; note = 2-fluororibose adenine
  modified_base 4: mod_base = OTHER; note = 2-O-methylribose adenine
  modified_base 5: mod_base = OTHER; note = 2-fluororibose guanine
  modified_base 6: mod_base = OTHER; note = 2-O-methylribose adenine
  modified_base 7: mod_base = OTHER; note = 2-fluororibose guanine
  modified_base 8: mod_base = OTHER; note = 2-fluororibose guanine
  modified_base 9: mod_base = OTHER; note = 2-fluororibose adenine
  modified_base 10: mod_base = cm
  modified_base 11: mod_base = OTHER; note = 2-fluororibose adenine
  modified_base 12: mod_base = gm
  modified_base 13: mod_base = OTHER; note = 2-fluororibose adenine
  modified_base 14: mod_base = gm
  modified_base 15: mod_base = OTHER; note = 2-fluororibose cytosine
  modified_base 16: mod_base = OTHER; note = 2-O-methylribose adenine
  modified_base 17: mod_base = OTHER; note = 2-fluororibose adenine
  modified_base 18: mod_base = OTHER; note = 2-O-methylribose adenine
  modified_base 19: mod_base = OTHER; note = 2-fluororibose adenine
  source 1..19: mol_type = other RNA
ggaagaggacagagcaaaa

SEQ ID NO: 201 - RNA, 19 nt, synthetic construct
  misc_feature 1..19: note = Synthetic: WV-38427
  misc_feature 1..19: note = Synthetic: SSR-0103800
  modified_base 1: mod_base = OTHER; note = 2-O-methylribose adenine
  modified_base 2: mod_base = gm
  modified_base 3: mod_base = OTHER; note = 2-fluororibose adenine
  modified_base 4: mod_base = gm
  modified_base 5: mod_base = OTHER; note = 2-fluororibose guanine
  modified_base 6: mod_base = OTHER; note = 2-O-methylribose adenine
  modified_base 7: mod_base = OTHER; note = 2-fluororibose cytosine
  modified_base 8: mod_base = OTHER; note = 2-fluororibose adenine
  modified_base 9: mod_base = OTHER; note = 2-fluororibose guanine
  modified_base 10: mod_base = OTHER; note = 2-O-methylribose adenine
  modified_base 11: mod_base = OTHER; note = 2-fluororibose guanine
  modified_base 12: mod_base = cm
  modified_base 13: mod_base = OTHER; note = 2-fluororibose adenine
  modified_base 14: mod_base = OTHER; note = 2-O-methylribose adenine
  modified_base 15: mod_base = OTHER; note = 2-fluororibose adenine
  modified_base 16: mod_base = gm
  modified_base 17: mod_base = OTHER; note = 2-fluororibose cytosine
  modified_base 18: mod_base = cm
  modified_base 19: mod_base = OTHER; note = 2-fluororibose adenine
  source 1..19: mol_type = other RNA
agaggacagagcaaagcca

SEQ ID NO: 202 - RNA, 19 nt, synthetic construct
  misc_feature 1..19: note = Synthetic: WV-38428
  misc_feature 1..19: note = Synthetic: SSR-0103897
  modified_base 1: mod_base = gm
  modified_base 2: mod_base = OTHER; note = 2-O-methylribose adenine
  modified_base 3: mod_base = OTHER; note = 2-fluororibose guanine
  modified_base 4: mod_base = gm
  modified_base 5: mod_base = OTHER; note = 2-fluororibose adenine
  modified_base 6: mod_base = cm
  modified_base 7: mod_base = OTHER; note = 2-fluororibose adenine
  modified_base 8: mod_base = OTHER; note = 2-fluororibose guanine
  modified_base 9: mod_base = OTHER; note = 2-fluororibose adenine
  modified_base 10: mod_base = gm
  modified_base 11: mod_base = OTHER; note = 2-fluororibose cytosine
  modified_base 12: mod_base = OTHER; note = 2-O-methylribose adenine
  modified_base 13: mod_base = OTHER; note = 2-fluororibose adenine
  modified_base 14: mod_base = OTHER; note = 2-O-methylribose adenine
  modified_base 15: mod_base = OTHER; note = 2-fluororibose guanine
  modified_base 16: mod_base = cm
  modified_base 17: mod_base = OTHER; note = 2-fluororibose cytosine
  modified_base 18: mod_base = OTHER; note = 2-O-methylribose adenine
  modified_base 19: mod_base = OTHER; note = 2-fluororibose adenine
  source 1..19: mol_type = other RNA
gaggacagagcaaagccaa

SEQ ID NO: 203 - RNA, 19 nt, synthetic construct
  misc_feature 1..19: note = Synthetic: WV-38429
  misc_feature 1..19: note = Synthetic: SSR-0103917
  modified_base 1: mod_base = gm
  modified_base 2: mod_base = gm
  modified_base 3: mod_base = OTHER; note = 2-fluororibose adenine
  modified_base 4: mod_base = cm
  modified_base 5: mod_base = OTHER; note = 2-fluororibose adenine
  modified_base 6: mod_base = gm
  modified_base 7: mod_base = OTHER; note = 2-fluororibose adenine
  modified_base 8: mod_base = OTHER; note = 2-fluororibose guanine
  modified_base 9: mod_base = OTHER; note = 2-fluororibose cytosine
  modified_base 10: mod_base = OTHER; note = 2-O-methylribose adenine
  modified_base 11: mod_base = OTHER; note = 2-fluororibose adenine
  modified_base 12: mod_base = OTHER; note = 2-O-methylribose adenine
  modified_base 13: mod_base = OTHER; note = 2-fluororibose guanine
  modified_base 14: mod_base = cm
  modified_base 15: mod_base = OTHER; note = 2-fluororibose cytosine
  modified_base 16: mod_base = OTHER; note = 2-O-methylribose adenine
  modified_base 17: mod_base = OTHER; note = 2-fluororibose uracil
  modified_base 18: mod_base = gm
  modified_base 19: mod_base = OTHER; note = 2-fluororibose adenine
  source 1..19: mol_type = other RNA
ggacagagcaaagccatga

SEQ ID NO: 204 - RNA, 19 nt, synthetic construct
  misc_feature 1..19: note = Synthetic: WV-38430
  misc_feature 1..19: note = Synthetic: SSR-0103889
  modified_base 1: mod_base = gm
  modified_base 2: mod_base = OTHER; note = 2-O-methylribose adenine
  modified_base 3: mod_base = OTHER; note = 2-fluororibose cytosine
  modified_base 4: mod_base = OTHER; note = 2-O-methylribose adenine
  modified_base 5: mod_base = OTHER; note = 2-fluororibose guanine
  modified_base 6: mod_base = OTHER; note = 2-O-methylribose adenine
  modified_base 7: mod_base = OTHER; note = 2-fluororibose guanine
  modified_base 8: mod_base = OTHER; note = 2-fluororibose cytosine
  modified_base 9: mod_base = OTHER; note = 2-fluororibose adenine
  modified_base 10: mod_base = OTHER; note = 2-O-methylribose adenine
  modified_base 11: mod_base = OTHER; note = 2-fluororibose adenine
  modified_base 12: mod_base = gm
  modified_base 13: mod_base = OTHER; note = 2-fluororibose cytosine
  modified_base 14: mod_base = cm
  modified_base 15: mod_base = OTHER; note = 2-fluororibose adenine
  modified_base 16: mod_base = um
  modified_base 17: mod_base = OTHER; note = 2-fluororibose guanine
  modified_base 18: mod_base = OTHER; note = 2-O-methylribose adenine
  modified_base 19: mod_base = OTHER; note = 2-fluororibose adenine
  source 1..19: mol_type = other RNA
gacagagcaaagccatgaa

SEQ ID NO: 205 - RNA, 19 nt, synthetic construct
  misc_feature 1..19: note = Synthetic: WV-38431
  misc_feature 1..19: note = Synthetic: SSR-0103799
  modified_base 1: mod_base = OTHER; note = 2-O-methylribose adenine
  modified_base 2: mod_base = gm
  modified_base 3: mod_base = OTHER; note = 2-fluororibose adenine
  modified_base 4: mod_base = gm
  modified_base 5: mod_base = OTHER; note = 2-fluororibose cytosine
  modified_base 6: mod_base = OTHER; note = 2-O-methylribose adenine
  modified_base 7: mod_base = OTHER; note = 2-fluororibose adenine
  modified_base 8: mod_base = OTHER; note = 2-fluororibose adenine
  modified_base 9: mod_base = OTHER; note = 2-fluororibose guanine
  modified_base 10: mod_base = cm
  modified_base 11: mod_base = OTHER; note = 2-fluororibose cytosine
  modified_base 12: mod_base = OTHER; note = 2-O-methylribose adenine
  modified_base 13: mod_base = OTHER; note = 2-fluororibose uracil
  modified_base 14: mod_base = gm
  modified_base 15: mod_base = OTHER; note = 2-fluororibose adenine
  modified_base 16: mod_base = OTHER; note = 2-O-methylribose adenine
  modified_base 17: mod_base = OTHER; note = 2-fluororibose cytosine
  modified_base 18: mod_base = OTHER; note = 2-O-methylribose adenine
  modified_base 19: mod_base = OTHER; note = 2-fluororibose adenine
  source 1..19: mol_type = other RNA
agagcaaagccatgaacaa

SEQ ID NO: 206 - RNA, 19 nt, synthetic construct
  misc_feature 1..19: note = Synthetic: WV-38432
  misc_feature 1..19: note = Synthetic: SSR-0103803
  modified_base 1: mod_base = OTHER; note = 2-O-methylribose adenine
  modified_base 2: mod_base = gm
  modified_base 3: mod_base = OTHER; note = 2-fluororibose cytosine
  modified_base 4: mod_base = OTHER; note = 2-O-methylribose adenine
  modified_base 5: mod_base = OTHER; note = 2-fluororibose adenine
  modified_base 6: mod_base = OTHER; note = 2-O-methylribose adenine
  modified_base 7: mod_base = OTHER; note = 2-fluororibose guanine
  modified_base 8: mod_base = OTHER; note = 2-fluororibose cytosine
  modified_base 9: mod_base = OTHER; note = 2-fluororibose cytosine
  modified_base 10: mod_base = OTHER; note = 2-O-methylribose adenine
  modified_base 11: mod_base = OTHER; note = 2-fluororibose uracil
  modified_base 12: mod_base = gm
  modified_base 13: mod_base = OTHER; note = 2-fluororibose adenine
  modified_base 14: mod_base = OTHER; note = 2-O-methylribose adenine
  modified_base 15: mod_base = OTHER; note = 2-fluororibose cytosine
  modified_base 16: mod_base = OTHER; note = 2-O-methylribose adenine
  modified_base 17: mod_base = OTHER; note = 2-fluororibose uracil
  modified_base 18: mod_base = cm
  modified_base 19: mod_base = OTHER; note = 2-fluororibose adenine
  source 1..19: mol_type = other RNA
agcaaagccatgaacatca

SEQ ID NO: 207 - RNA, 19 nt, synthetic construct
  misc_feature 1..19: note = Synthetic: WV-38433
  misc_feature 1..19: note = Synthetic: SSR-0103903
  modified_base 1: mod_base = gm
  modified_base 2: mod_base = cm
  modified_base 3: mod_base = OTHER; note = 2-fluororibose adenine
  modified_base 4: mod_base = OTHER; note = 2-O-methylribose adenine
  modified_base 5: mod_base = OTHER; note = 2-fluororibose adenine
  modified_base 6: mod_base = gm
  modified_base 7: mod_base = OTHER; note = 2-fluororibose cytosine
  modified_base 8: mod_base = OTHER; note = 2-fluororibose cytosine
  modified_base 9: mod_base = OTHER; note = 2-fluororibose adenine
  modified_base 10: mod_base = um
  modified_base 11: mod_base = OTHER; note = 2-fluororibose guanine
  modified_base 12: mod_base = OTHER; note = 2-O-methylribose adenine
  modified_base 13: mod_base = OTHER; note = 2-fluororibose adenine
  modified_base 14: mod_base = cm
  modified_base 15: mod_base = OTHER; note = 2-fluororibose adenine
  modified_base 16: mod_base = um
  modified_base 17: mod_base = OTHER; note = 2-fluororibose cytosine
  modified_base 18: mod_base = OTHER; note = 2-O-methylribose adenine
  modified_base 19: mod_base = OTHER; note = 2-fluororibose adenine
  source 1..19: mol_type = other RNA
gcaaagccatgaacatcaa

SEQ ID NO: 208 - RNA, 19 nt, synthetic construct
  misc_feature 1..19: note = Synthetic: WV-38434
  misc_feature 1..19: note = Synthetic: SSR-0103804
  modified_base 1: mod_base = OTHER; note = 2-O-methylribose adenine
  modified_base 2: mod_base = gm
  modified_base 3: mod_base = OTHER; note = 2-fluororibose cytosine
  modified_base 4: mod_base = cm
  modified_base 5: mod_base = OTHER; note = 2-fluororibose adenine
  modified_base 6: mod_base = um
  modified_base 7: mod_base = OTHER; note = 2-fluororibose guanine
  modified_base 8: mod_base = OTHER; note = 2-fluororibose adenine
  modified_base 9: mod_base = OTHER; note = 2-fluororibose adenine
  modified_base 10: mod_base = cm
  modified_base 11: mod_base = OTHER; note = 2-fluororibose adenine
  modified_base 12: mod_base = um
  modified_base 13: mod_base = OTHER; note = 2-fluororibose cytosine
  modified_base 14: mod_base = OTHER; note = 2-O-methylribose adenine
  modified_base 15: mod_base = OTHER; note = 2-fluororibose uracil
  modified_base 16: mod_base = cm
  modified_base 17: mod_base = OTHER; note = 2-fluororibose cytosine
  modified_base 18: mod_base = um
  modified_base 19: mod_base = OTHER; note = 2-fluororibose adenine
  source 1..19: mol_type = other RNA
agccatgaacatcatccta

SEQ ID NO: 209 - RNA, 19 nt, synthetic construct
  misc_feature 1..19: note = Synthetic: WV-38435
  misc_feature 1..19: note = Synthetic: SSR-0103848
  modified_base 1: mod_base = cm
  modified_base 2: mod_base = cm
  modified_base 3: mod_base = OTHER; note = 2-fluororibose adenine
  modified_base 4: mod_base = um
  modified_base 5: mod_base = OTHER; note = 2-fluororibose guanine
  modified_base 6: mod_base = OTHER; note = 2-O-methylribose adenine
  modified_base 7: mod_base = OTHER; note = 2-fluororibose adenine
  modified_base 8: mod_base = OTHER; note = 2-fluororibose cytosine
  modified_base 9: mod_base = OTHER; note = 2-fluororibose adenine
  modified_base 10: mod_base = um
  modified_base 11: mod_base = OTHER; note = 2-fluororibose cytosine
  modified_base 12: mod_base = OTHER; note = 2-O-methylribose adenine
  modified_base 13: mod_base = OTHER; note = 2-fluororibose uracil
  modified_base 14: mod_base = cm
  modified_base 15: mod_base = OTHER; note = 2-fluororibose cytosine
  modified_base 16: mod_base = um
  modified_base 17: mod_base = OTHER; note = 2-fluororibose adenine
  modified_base 18: mod_base = gm
  modified_base 19: mod_base = OTHER; note = 2-fluororibose adenine
  source 1..19: mol_type = other RNA
ccatgaacatcatcctaga

SEQ ID NO: 210 - RNA, 19 nt, synthetic construct
  misc_feature 1..19: note = Synthetic: WV-38436
  misc_feature 1..19: note = Synthetic: SSR-0103837
  modified_base 1: mod_base = cm
  modified_base 2: mod_base = OTHER; note = 2-O-methylribose adenine
  modified_base 3: mod_base = OTHER; note = 2-fluororibose uracil
  modified_base 4: mod_base = gm
  modified_base 5: mod_base = OTHER; note = 2-fluororibose adenine
  modified_base 6: mod_base = OTHER; note = 2-O-methylribose adenine
  modified_base 7: mod_base = OTHER; note = 2-fluororibose cytosine
  modified_base 8: mod_base = OTHER; note = 2-fluororibose adenine
  modified_base 9: mod_base = OTHER; note = 2-fluororibose uracil
  modified_base 10: mod_base = cm
  modified_base 11: mod_base = OTHER; note = 2-fluororibose adenine
  modified_base 12: mod_base = um
  modified_base 13: mod_base = OTHER; note = 2-fluororibose cytosine
  modified_base 14: mod_base = cm
  modified_base 15: mod_base = OTHER; note = 2-fluororibose uracil
  modified_base 16: mod_base = OTHER; note = 2-O-methylribose adenine
  modified_base 17: mod_base = OTHER; note = 2-fluororibose guanine
  modified_base 18: mod_base = OTHER; note = 2-O-methylribose adenine
  modified_base 19: mod_base = OTHER; note = 2-fluororibose adenine
  source 1..19: mol_type = other RNA
catgaacatcatcctagaa

SEQ ID NO: 211 - RNA, 19 nt, synthetic construct
  misc_feature 1..19: note = Synthetic: WV-38437
  misc_feature 1..19: note = Synthetic: SSR-0103817
  modified_base 1: mod_base = OTHER; note = 2-O-methylribose adenine
  modified_base 2: mod_base = um
  modified_base 3: mod_base = OTHER; note = 2-fluororibose guanine
  modified_base 4: mod_base = OTHER; note = 2-O-methylribose adenine
  modified_base 5: mod_base = OTHER; note = 2-fluororibose adenine
  modified_base 6: mod_base = cm
  modified_base 7: mod_base = OTHER; note = 2-fluororibose adenine
  modified_base 8: mod_base = OTHER; note = 2-fluororibose uracil
  modified_base 9: mod_base = OTHER; note = 2-fluororibose cytosine
  modified_base 10: mod_base = OTHER; note = 2-O-methylribose adenine
  modified_base 11: mod_base = OTHER; note = 2-fluororibose uracil
  modified_base 12: mod_base = cm
  modified_base 13: mod_base = OTHER; note = 2-fluororibose cytosine
  modified_base 14: mod_base = um
  modified_base 15: mod_base = OTHER; note = 2-fluororibose adenine
  modified_base 16: mod_base = gm
  modified_base 17: mod_base = OTHER; note = 2-fluororibose adenine
  modified_base 18: mod_base = OTHER; note = 2-O-methylribose adenine
  modified_base 19: mod_base = OTHER; note = 2-fluororibose adenine
  source 1..19: mol_type = other RNA
atgaacatcatcctagaaa

SEQ ID NO: 212 - RNA, 19 nt, synthetic construct
  misc_feature 1..19: note = Synthetic: WV-38438
  misc_feature 1..19: note = Synthetic: SSR-0103951
  modified_base 1: mod_base = um
  modified_base 2: mod_base = gm
  modified_base 3: mod_base = OTHER; note = 2-fluororibose adenine
  modified_base 4: mod_base = OTHER; note = 2-O-methylribose adenine
  modified_base 5: mod_base = OTHER; note = 2-fluororibose cytosine
  modified_base 6: mod_base = OTHER; note = 2-O-methylribose adenine
  modified_base 7: mod_base = OTHER; note = 2-fluororibose uracil
  modified_base 8: mod_base = OTHER; note = 2-fluororibose cytosine
  modified_base 9: mod_base = OTHER; note = 2-fluororibose adenine
  modified_base 10: mod_base = um
  modified_base 11: mod_base = OTHER; note = 2-fluororibose cytosine
  modified_base 12: mod_base = cm
  modified_base 13: mod_base = OTHER; note = 2-fluororibose uracil
  modified_base 14: mod_base = OTHER; note = 2-O-methylribose adenine
  modified_base 15: mod_base = OTHER; note = 2-fluororibose guanine
  modified_base 16: mod_base = OTHER; note = 2-O-methylribose adenine
  modified_base 17: mod_base = OTHER; note = 2-fluororibose adenine
  modified_base 18: mod_base = OTHER; note = 2-O-methylribose adenine
  modified_base 19: mod_base = OTHER; note = 2-fluororibose adenine
  source 1..19: mol_type = other RNA
tgaacatcatcctagaaaa

SEQ ID NO: 213 - RNA, 19 nt, synthetic construct
  misc_feature 1..19: note = Synthetic: WV-38439
  misc_feature 1..19: note = Synthetic: SSR-0103875
  modified_base 1: mod_base = gm
  modified_base 2: mod_base = OTHER; note = 2-O-methylribose adenine
  modified_base 3: mod_base = OTHER; note = 2-fluororibose adenine
  modified_base 4: mod_base = cm
  modified_base 5: mod_base = OTHER; note = 2-fluororibose adenine
  modified_base 6: mod_base = um
  modified_base 7: mod_base = OTHER; note = 2-fluororibose cytosine
  modified_base 8: mod_base = OTHER; note = 2-fluororibose adenine
  modified_base 9: mod_base = OTHER; note = 2-fluororibose uracil
  modified_base 10: mod_base = cm
  modified_base 11: mod_base = OTHER; note = 2-fluororibose cytosine
  modified_base 12: mod_base = um
  modified_base 13: mod_base = OTHER; note = 2-fluororibose adenine
  modified_base 14: mod_base = gm
  modified_base 15: mod_base = OTHER; note = 2-fluororibose adenine
  modified_base 16: mod_base = OTHER; note = 2-O-methylribose adenine
  modified_base 17: mod_base = OTHER; note = 2-fluororibose adenine
  modified_base 18: mod_base = um
  modified_base 19: mod_base = OTHER; note = 2-fluororibose adenine
  source 1..19: mol_type = other RNA
gaacatcatcctagaaata

SEQ ID NO: 214 - RNA, 19 nt, synthetic construct
  misc_feature 1..19: note = Synthetic: WV-38440
  misc_feature 1..19: note = Synthetic: SSR-0103835
  modified_base 1: mod_base = cm
  modified_base 2: mod_base = OTHER; note = 2-O-methylribose adenine
  modified_base 3: mod_base = OTHER; note = 2-fluororibose uracil
  modified_base 4: mod_base = cm
  modified_base 5: mod_base = OTHER; note = 2-fluororibose adenine
  modified_base 6: mod_base = um
  modified_base 7: mod_base = OTHER; note = 2-fluororibose cytosine
  modified_base 8: mod_base = OTHER; note = 2-fluororibose cytosine
  modified_base 9: mod_base = OTHER; note = 2-fluororibose uracil
  modified_base 10: mod_base = OTHER; note = 2-O-methylribose adenine
  modified_base 11: mod_base = OTHER; note = 2-fluororibose guanine
  modified_base 12: mod_base = OTHER; note = 2-O-methylribose adenine
  modified_base 13: mod_base = OTHER; note = 2-fluororibose adenine
  modified_base 14: mod_base = OTHER; note = 2-O-methylribose adenine
  modified_base 15: mod_base = OTHER; note = 2-fluororibose uracil
  modified_base 16: mod_base = cm
  modified_base 17: mod_base = OTHER; note = 2-fluororibose cytosine
  modified_base 18: mod_base = um
  modified_base 19: mod_base = OTHER; note = 2-fluororibose adenine
  source 1..19: mol_type = other RNA
catcatcctagaaatccta

SEQ ID NO: 215 - RNA, 19 nt, synthetic construct
  misc_feature 1..19: note = Synthetic: WV-38441
  misc_feature 1..19: note = Synthetic: SSR-0103854
  modified_base 1: mod_base = cm
  modified_base 2: mod_base = cm
  modified_base 3: mod_base = OTHER; note = 2-fluororibose uracil
  modified_base 4: mod_base = OTHER; note = 2-O-methylribose adenine
  modified_base 5: mod_base = OTHER; note = 2-fluororibose guanine
  modified_base 6: mod_base = OTHER; note = 2-O-methylribose adenine
  modified_base 7: mod_base = OTHER; note = 2-fluororibose adenine
  modified_base 8: mod_base = OTHER; note = 2-fluororibose adenine
  modified_base 9: mod_base = OTHER; note = 2-fluororibose uracil
  modified_base 10: mod_base = cm
  modified_base 11: mod_base = OTHER; note = 2-fluororibose cytosine
  modified_base 12: mod_base = um
  modified_base 13: mod_base = OTHER; note = 2-fluororibose uracil
  modified_base 14: mod_base = cm
  modified_base 15: mod_base = OTHER; note = 2-fluororibose uracil
  modified_base 16: mod_base = gm
  modified_base 17: mod_base = OTHER; note = 2-fluororibose cytosine
  modified_base 18: mod_base = um
  modified_base 19: mod_base = OTHER; note = 2-fluororibose adenine
  source 1..19: mol_type = other RNA
cctagaaatccttctgcta

SEQ ID NO: 216 - RNA, 19 nt, synthetic construct
  misc_feature 1..19: note = Synthetic: WV-38442
  misc_feature 1..19: note = Synthetic: SSR-0103943
  modified_base 1: mod_base = um
  modified_base 2: mod_base = OTHER; note = 2-O-methylribose adenine
  modified_base 3: mod_base = OTHER; note = 2-fluororibose guanine
  modified_base 4: mod_base = OTHER; note = 2-O-methylribose adenine
  modified_base 5: mod_base = OTHER; note = 2-fluororibose adenine
  modified_base 6: mod_base = OTHER; note = 2-O-methylribose adenine
  modified_base 7: mod_base = OTHER; note = 2-fluororibose uracil
  modified_base 8: mod_base = OTHER; note = 2-fluororibose cytosine
  modified_base 9: mod_base = OTHER; note = 2-fluororibose cytosine
  modified_base 10: mod_base = um
  modified_base 11: mod_base = OTHER; note = 2-fluororibose uracil
  modified_base 12: mod_base = cm
  modified_base 13: mod_base = OTHER; note = 2-fluororibose uracil
  modified_base 14: mod_base = gm
  modified_base 15: mod_base = OTHER; note = 2-fluororibose cytosine
  modified_base 16: mod_base = um
  modified_base 17: mod_base = OTHER; note = 2-fluororibose uracil
  modified_base 18: mod_base = cm
  modified_base 19: mod_base = OTHER; note = 2-fluororibose adenine
  source 1..19: mol_type = other RNA
tagaaatccttctgcttca

SEQ ID NO: 217 - RNA, 19 nt, synthetic construct
  misc_feature 1..19: note = Synthetic: WV-38443
  misc_feature 1..19: note = Synthetic: SSR-0103874
  modified_base 1: mod_base = gm
  modified_base 2: mod_base = OTHER; note = 2-O-methylribose adenine
  modified_base 3: mod_base = OTHER; note = 2-fluororibose adenine
  modified_base 4: mod_base = OTHER; note = 2-O-methylribose adenine
  modified_base 5: mod_base = OTHER; note = 2-fluororibose uracil
  modified_base 6: mod_base = cm
  modified_base 7: mod_base = OTHER; note = 2-fluororibose cytosine
  modified_base 8: mod_base = OTHER; note = 2-fluororibose uracil
  modified_base 9: mod_base = OTHER; note = 2-fluororibose uracil
  modified_base 10: mod_base = cm
  modified_base 11: mod_base = OTHER; note = 2-fluororibose uracil
  modified_base 12: mod_base = gm
  modified_base 13: mod_base = OTHER; note = 2-fluororibose cytosine
  modified_base 14: mod_base = um
  modified_base 15: mod_base = OTHER; note = 2-fluororibose uracil
  modified_base 16: mod_base = cm
  modified_base 17: mod_base = OTHER; note = 2-fluororibose uracil
  modified_base 18: mod_base = gm
  modified_base 19: mod_base = OTHER; note = 2-fluororibose adenine
  source 1..19: mol_type = other RNA
gaaatccttctgcttctga

SEQ ID NO: 218 - RNA, 19 nt, synthetic construct
  misc_feature 1..19: note = Synthetic: WV-38444
  misc_feature 1..19: note = Synthetic: SSR-0103772
  modified_base 1: mod_base = OTHER; note = 2-O-methylribose adenine
  modified_base 2: mod_base = OTHER; note = 2-O-methylribose adenine
  modified_base 3: mod_base = OTHER; note = 2-fluororibose adenine
  modified_base 4: mod_base = um
  modified_base 5: mod_base = OTHER; note = 2-fluororibose cytosine
  modified_base 6: mod_base = cm
  modified_base 7: mod_base = OTHER; note = 2-fluororibose uracil
  modified_base 8: mod_base = OTHER; note = 2-fluororibose uracil
  modified_base 9: mod_base = OTHER; note = 2-fluororibose cytosine
  modified_base 10: mod_base = um
  modified_base 11: mod_base = OTHER; note = 2-fluororibose guanine
  modified_base 12: mod_base = cm
  modified_base 13: mod_base = OTHER; note = 2-fluororibose uracil
  modified_base 14: mod_base = um
  modified_base 15: mod_base = OTHER; note = 2-fluororibose cytosine
  modified_base 16: mod_base = um
  modified_base 17: mod_base = OTHER; note = 2-fluororibose guanine
  modified_base 18: mod_base = OTHER; note = 2-O-methylribose adenine
  modified_base 19: mod_base = OTHER; note = 2-fluororibose adenine
  source 1..19: mol_type = other RNA
aaatccttctgcttctgaa

SEQ ID NO: 219 - RNA, 19 nt, synthetic construct
  misc_feature 1..19: note = Synthetic: WV-38445
  misc_feature 1..19: note = Synthetic: SSR-0103816
  modified_base 1: mod_base = OTHER; note = 2-O-methylribose adenine
  modified_base 2: mod_base = um
  modified_base 3: mod_base = OTHER; note = 2-fluororibose cytosine
  modified_base 4: mod_base = cm
  modified_base 5: mod_base = OTHER; note = 2-fluororibose uracil
  modified_base 6: mod_base = um
  modified_base 7: mod_base = OTHER; note = 2-fluororibose cytosine
  modified_base 8: mod_base = OTHER; note = 2-fluororibose uracil
  modified_base 9: mod_base = OTHER; note = 2-fluororibose guanine
  modified_base 10: mod_base = cm
  modified_base 11: mod_base = OTHER; note = 2-fluororibose uracil
  modified_base 12: mod_base = um
  modified_base 13: mod_base = OTHER; note = 2-fluororibose cytosine
  modified_base 14: mod_base = um
  modified_base 15: mod_base = OTHER; note = 2-fluororibose guanine
  modified_base 16: mod_base = OTHER; note = 2-O-methylribose adenine
  modified_base 17: mod_base = OTHER; note = 2-fluororibose uracil
  modified_base 18: mod_base = cm
  modified_base 19: mod_base = OTHER; note = 2-fluororibose adenine
  source 1..19: mol_type = other RNA
atccttctgcttctgatca

SEQ ID NO: 220 - RNA, 19 nt, synthetic construct
  misc_feature 1..19: note = Synthetic: WV-38446
  misc_feature 1..19: note = Synthetic: SSR-0103870
  modified_base 1: mod_base = cm
  modified_base 2: mod_base = um
  modified_base 3: mod_base = OTHER; note = 2-fluororibose uracil
  modified_base 4: mod_base = cm
  modified_base 5: mod_base = OTHER; note = 2-fluororibose uracil
  modified_base 6: mod_base = gm
  modified_base 7: mod_base = OTHER; note = 2-fluororibose cytosine
  modified_base 8: mod_base = OTHER; note = 2-fluororibose uracil
  modified_base 9: mod_base = OTHER; note = 2-fluororibose uracil
  modified_base 10: mod_base = cm
  modified_base 11: mod_base = OTHER; note = 2-fluororibose uracil
  modified_base 12: mod_base = gm
  modified_base 13: mod_base = OTHER; note = 2-fluororibose adenine
  modified_base 14: mod_base = um
  modified_base 15: mod_base = OTHER; note = 2-fluororibose cytosine
  modified_base 16: mod_base = OTHER; note = 2-O-methylribose adenine
  modified_base 17: mod_base = OTHER; note = 2-fluororibose cytosine
  modified_base 18: mod_base = cm
  modified_base 19: mod_base = OTHER; note = 2-fluororibose adenine
  source 1..19: mol_type = other RNA
cttctgcttctgatcacca

SEQ ID NO: 221 - RNA, 19 nt, synthetic construct
  misc_feature 1..19: note = Synthetic: WV-38447
  misc_feature 1..19: note = Synthetic: SSR-0103863
  modified_base 1: mod_base = cm
  modified_base 2: mod_base = um
  modified_base 3: mod_base = OTHER; note = 2-fluororibose guanine
  modified_base 4: mod_base = cm
  modified_base 5: mod_base = OTHER; note = 2-fluororibose uracil
  modified_base 6: mod_base = um
  modified_base 7: mod_base = OTHER; note = 2-fluororibose cytosine
  modified_base 8: mod_base = OTHER; note = 2-fluororibose uracil
  modified_base 9: mod_base = OTHER; note = 2-fluororibose guanine
  modified_base 10: mod_base = OTHER; note = 2-O-methylribose adenine
  modified_base 11: mod_base = OTHER; note = 2-fluororibose uracil
  modified_base 12: mod_base = cm
  modified_base 13: mod_base = OTHER; note = 2-fluororibose adenine
  modified_base 14: mod_base = cm
  modified_base 15: mod_base = OTHER; note = 2-fluororibose cytosine
  modified_base 16: mod_base = OTHER; note = 2-O-methylribose adenine
  modified_base 17: mod_base = OTHER; note = 2-fluororibose uracil
  modified_base 18: mod_base = cm
  modified_base 19: mod_base = OTHER; note = 2-fluororibose adenine
  source 1..19: mol_type = other RNA
ctgcttctgatcaccatca

SEQ ID NO: 222 - RNA, 19 nt, synthetic construct
  misc_feature 1..19: note = Synthetic: WV-38448
  misc_feature 1..19: note = Synthetic: SSR-0103954
  modified_base 1: mod_base = um
  modified_base 2: mod_base = gm
  modified_base 3: mod_base = OTHER; note = 2-fluororibose cytosine
  modified_base 4: mod_base = um
  modified_base 5: mod_base = OTHER; note = 2-fluororibose uracil
  modified_base 6: mod_base = cm
  modified_base 7: mod_base = OTHER; note = 2-fluororibose uracil
  modified_base 8: mod_base = OTHER; note = 2-fluororibose guanine
  modified_base 9: mod_base = OTHER; note = 2-fluororibose adenine
  modified_base 10: mod_base = um
  modified_base 11: mod_base = OTHER; note = 2-fluororibose cytosine
  modified_base 12: mod_base = OTHER; note = 2-O-methylribose adenine
  modified_base 13: mod_base = OTHER; note = 2-fluororibose cytosine
  modified_base 14: mod_base = cm
  modified_base 15: mod_base = OTHER; note = 2-fluororibose adenine
  modified_base 16: mod_base = um
  modified_base 17: mod_base = OTHER; note = 2-fluororibose cytosine
  modified_base 18: mod_base = OTHER; note = 2-O-methylribose adenine
  modified_base 19: mod_base = OTHER; note = 2-fluororibose adenine
  source 1..19: mol_type = other RNA
tgcttctgatcaccatcaa

SEQ ID NO: 223 - RNA, 19 nt, synthetic construct
  misc_feature 1..19: note = Synthetic: WV-38449
  misc_feature 1..19: note = Synthetic: SSR-0103911
  modified_base 1: mod_base = gm
  modified_base 2: mod_base = cm
  modified_base 3: mod_base = OTHER; note = 2-fluororibose uracil
  modified_base 4: mod_base = um
  modified_base 5: mod_base = OTHER; note = 2-fluororibose cytosine
  modified_base 6: mod_base = um
  modified_base 7: mod_base = OTHER; note = 2-fluororibose guanine
  modified_base 8: mod_base = OTHER; note = 2-fluororibose adenine
  modified_base 9: mod_base = OTHER; note = 2-fluororibose uracil
  modified_base 10: mod_base = cm
  modified_base 11: mod_base = OTHER; note = 2-fluororibose adenine
  modified_base 12: mod_base = cm
  modified_base 13: mod_base = OTHER; note = 2-fluororibose cytosine
  modified_base 14: mod_base = OTHER; note = 2-O-methylribose adenine
  modified_base 15: mod_base = OTHER; note = 2-fluororibose uracil
  modified_base 16: mod_base = cm
  modified_base 17: mod_base = OTHER; note = 2-fluororibose adenine
  modified_base 18: mod_base = um
  modified_base 19: mod_base = OTHER; note = 2-fluororibose adenine
  source 1..19: mol_type = other RNA
gcttctgatcaccatcata

SEQ ID NO: 224 - RNA, 19 nt, synthetic construct
  misc_feature 1..19: note = Synthetic: WV-38450
  misc_feature 1..19: note = Synthetic: SSR-0103958
  modified_base 1: mod_base = um
  modified_base 2: mod_base = um
  modified_base 3: mod_base = OTHER; note = 2-fluororibose cytosine
  modified_base 4: mod_base = um
  modified_base 5: mod_base = OTHER; note = 2-fluororibose guanine
  modified_base 6: mod_base = OTHER; note = 2-O-methylribose adenine
  modified_base 7: mod_base = OTHER; note = 2-fluororibose uracil
  modified_base 8: mod_base = OTHER; note = 2-fluororibose cytosine
  modified_base 9: mod_base = OTHER; note = 2-fluororibose adenine
  modified_base 10: mod_base = cm
  modified_base 11: mod_base = OTHER; note = 2-fluororibose cytosine
  modified_base 12: mod_base = OTHER; note = 2-O-methylribose adenine
  modified_base 13: mod_base = OTHER; note = 2-fluororibose uracil
  modified_base 14: mod_base = cm
  modified_base 15: mod_base = OTHER; note = 2-fluororibose adenine
  modified_base 16: mod_base = um
  modified_base 17: mod_base = OTHER; note = 2-fluororibose cytosine
  modified_base 18: mod_base = um
  modified_base 19: mod_base = OTHER; note = 2-fluororibose adenine
  source 1..19: mol_type = other RNA
ttctgatcaccatcatcta

SEQ ID NO: 225 - RNA, 19 nt, synthetic construct
  misc_feature 1..19: note = Synthetic: WV-38451
  misc_feature 1..19: note = Synthetic: SSR-0103945
  modified_base 1: mod_base = um
  modified_base 2: mod_base = cm
  modified_base 3: mod_base = OTHER; note = 2-fluororibose adenine
  modified_base 4: mod_base = cm
  modified_base 5: mod_base = OTHER; note = 2-fluororibose cytosine
  modified_base 6: mod_base = OTHER; note = 2-O-methylribose adenine
  modified_base 7: mod_base = OTHER; note = 2-fluororibose uracil
  modified_base 8: mod_base = OTHER; note = 2-fluororibose cytosine
  modified_base 9: mod_base = OTHER; note = 2-fluororibose adenine
  modified_base 10: mod_base = um
  modified_base 11: mod_base = OTHER; note = 2-fluororibose cytosine
  modified_base 12: mod_base = um
  modified_base 13: mod_base = OTHER; note = 2-fluororibose adenine
  modified_base 14: mod_base = cm
  modified_base 15: mod_base = OTHER; note = 2-fluororibose uracil
  modified_base 16: mod_base = cm
  modified_base 17: mod_base = OTHER; note = 2-fluororibose cytosine
  modified_base 18: mod_base = um
  modified_base 19: mod_base = OTHER; note = 2-fluororibose adenine
  source 1..19: mol_type = other RNA
tcaccatcatctactccta

SEQ ID NO: 226 - RNA, 19 nt, synthetic construct
  misc_feature 1..19: note = Synthetic: WV-38452
  misc_feature 1..19: note = Synthetic: SSR-0103847
  modified_base 1: mod_base = cm
  modified_base 2: mod_base = cm
  modified_base 3: mod_base = OTHER; note = 2-fluororibose adenine
  modified_base 4: mod_base = um
  modified_base 5: mod_base = OTHER; note = 2-fluororibose cytosine
  modified_base 6: mod_base = OTHER; note = 2-O-methylribose adenine
  modified_base 7: mod_base = OTHER; note = 2-fluororibose uracil
  modified_base 8: mod_base = OTHER; note = 2-fluororibose cytosine
  modified_base 9: mod_base = OTHER; note = 2-fluororibose uracil
  modified_base 10: mod_base = OTHER; note = 2-O-methylribose adenine
  modified_base 11: mod_base = OTHER; note = 2-fluororibose cytosine
  modified_base 12: mod_base = um
  modified_base 13: mod_base = OTHER; note = 2-fluororibose cytosine
  modified_base 14: mod_base = cm
  modified_base 15: mod_base = OTHER; note = 2-fluororibose uracil
  modified_base 16: mod_base = OTHER; note = 2-O-methylribose adenine
  modified_base 17: mod_base = OTHER; note = 2-fluororibose cytosine
  modified_base 18: mod_base = um
  modified_base 19: mod_base = OTHER; note = 2-fluororibose adenine
  source 1..19: mol_type = other RNA
ccatcatctactcctacta

SEQ ID NO: 227 - RNA, 19 nt, synthetic construct
  misc_feature 1..19: note = Synthetic: WV-38453
  misc_feature 1..19: note = Synthetic: SSR-0103836
  modified_base 1: mod_base = cm
  modified_base 2: mod_base = OTHER; note = 2-O-methylribose adenine
  modified_base 3: mod_base = OTHER; note = 2-fluororibose uracil
  modified_base 4: mod_base = cm
  modified_base 5: mod_base = OTHER; note = 2-fluororibose adenine
  modified_base 6: mod_base = um
  modified_base 7: mod_base = OTHER; note = 2-fluororibose cytosine
  modified_base 8: mod_base = OTHER; note = 2-fluororibose uracil
  modified_base 9: mod_base = OTHER; note = 2-fluororibose adenine
  modified_base 10: mod_base = cm
  modified_base 11: mod_base = OTHER; note = 2-fluororibose uracil
  modified_base 12: mod_base = cm
  modified_base 13: mod_base = OTHER; note = 2-fluororibose cytosine
  modified_base 14: mod_base = um
  modified_base 15: mod_base = OTHER; note = 2-fluororibose adenine
  modified_base 16: mod_base = cm
  modified_base 17: mod_base = OTHER; note = 2-fluororibose uracil
  modified_base 18: mod_base = um
  modified_base 19: mod_base = OTHER; note = 2-fluororibose adenine
  source 1..19: mol_type = other RNA
catcatctactcctactta

SEQ ID NO: 228 - RNA, 19 nt, synthetic construct
  misc_feature 1..19: note = Synthetic: WV-38454
  misc_feature 1..19: note = Synthetic: SSR-0103946
  modified_base 1: mod_base = um
  modified_base 2: mod_base = cm
  modified_base 3: mod_base = OTHER; note = 2-fluororibose adenine
  modified_base 4: mod_base = um
  modified_base 5: mod_base = OTHER; note = 2-fluororibose cytosine
  modified_base 6: mod_base = um
  modified_base 7: mod_base = OTHER; note = 2-fluororibose adenine
  modified_base 8: mod_base = OTHER; note = 2-fluororibose cytosine
  modified_base 9: mod_base = OTHER; note = 2-fluororibose uracil
  modified_base 10: mod_base = cm
  modified_base 11: mod_base = OTHER; note = 2-fluororibose cytosine
  modified_base 12: mod_base = um
  modified_base 13: mod_base = OTHER; note = 2-fluororibose adenine
  modified_base 14: mod_base = cm
  modified_base 15: mod_base = OTHER; note = 2-fluororibose uracil
  modified_base 16: mod_base = um
  modified_base 17: mod_base = OTHER; note = 2-fluororibose guanine
  modified_base 18: mod_base = gm
  modified_base 19: mod_base = OTHER; note = 2-fluororibose adenine
  source 1..19: mol_type = other RNA
tcatctactcctacttgga

SEQ ID NO: 229 - RNA, 19 nt, synthetic construct
  misc_feature 1..19: note = Synthetic: WV-38455
  misc_feature 1..19: note = Synthetic: SSR-0103792
  modified_base 1: mod_base = OTHER; note = 2-O-methylribose adenine
  modified_base 2: mod_base = cm
  modified_base 3: mod_base = OTHER; note = 2-fluororibose uracil
  modified_base 4: mod_base = cm
  modified_base 5: mod_base = OTHER; note = 2-fluororibose cytosine
  modified_base 6: mod_base = um
  modified_base 7: mod_base = OTHER; note = 2-fluororibose adenine
  modified_base 8: mod_base = OTHER; note = 2-fluororibose cytosine
  modified_base 9: mod_base = OTHER; note = 2-fluororibose uracil
  modified_base 10: mod_base = um
  modified_base 11: mod_base = OTHER; note = 2-fluororibose guanine
  modified_base 12: mod_base = gm
  modified_base 13: mod_base = OTHER; note = 2-fluororibose adenine
  modified_base 14: mod_base = gm
  modified_base 15: mod_base = OTHER; note = 2-fluororibose uracil
  modified_base 16: mod_base = cm
  modified_base 17: mod_base = OTHER; note = 2-fluororibose guanine
  modified_base 18: mod_base = um
  modified_base 19: mod_base = OTHER; note = 2-fluororibose adenine
  source 1..19: mol_type = other RNA
actcctacttggagtcgta

SEQ ID NO: 230 - RNA, 19 nt, synthetic construct
  misc_feature 1..19: note = Synthetic: WV-38456
  misc_feature 1..19: note = Synthetic: SSR-0103853
  modified_base 1: mod_base = cm
  modified_base 2: mod_base = cm
  modified_base 3: mod_base = OTHER; note = 2-fluororibose uracil
  modified_base 4: mod_base = OTHER; note = 2-O-methylribose adenine
  modified_base 5: mod_base = OTHER; note = 2-fluororibose cytosine
  modified_base 6: mod_base = um
  modified_base 7: mod_base = OTHER; note = 2-fluororibose uracil
  modified_base 8: mod_base = OTHER; note = 2-fluororibose guanine
  modified_base 9: mod_base = OTHER; note = 2-fluororibose guanine
  modified_base 10: mod_base = OTHER; note = 2-O-methylribose adenine
  modified_base 11: mod_base = OTHER; note = 2-fluororibose guanine
  modified_base 12: mod_base = um
  modified_base 13: mod_base = OTHER; note = 2-fluororibose cytosine
  modified_base 14: mod_base = gm
  modified_base 15: mod_base = OTHER; note = 2-fluororibose uracil
  modified_base 16: mod_base = um
  modified_base 17: mod_base = OTHER; note = 2-fluororibose guanine
  modified_base 18: mod_base = gm
  modified_base 19: mod_base = OTHER; note = 2-fluororibose adenine
  source 1..19: mol_type = other RNA
cctacttggagtcgttgga

SEQ ID NO: 231 - RNA, 19 nt, synthetic construct
  misc_feature 1..19: note = Synthetic: WV-38457
  misc_feature 1..19: note = Synthetic: SSR-0103779
  modified_base 1: mod_base = OTHER; note = 2-O-methylribose adenine
  modified_base 2: mod_base = OTHER; note = 2-O-methylribose adenine
  modified_base 3: mod_base = OTHER; note = 2-fluororibose guanine
  modified_base 4: mod_base = um
  modified_base 5: mod_base = OTHER; note = 2-fluororibose uracil
  modified_base 6: mod_base = um
  modified_base 7: mod_base = OTHER; note = 2-fluororibose uracil
  modified_base 8: mod_base = OTHER; note = 2-fluororibose uracil
  modified_base 9: mod_base = OTHER; note = 2-fluororibose cytosine
  modified_base 10: mod_base = OTHER; note = 2-O-methylribose adenine
  modified_base 11: mod_base = OTHER; note = 2-fluororibose uracil
  modified_base 12: mod_base = um
  modified_base 13: mod_base = OTHER; note = 2-fluororibose cytosine
  modified_base 14: mod_base = cm
  modified_base 15: mod_base = OTHER; note = 2-fluororibose uracil
  modified_base 16: mod_base = cm
  modified_base 17: mod_base = OTHER; note = 2-fluororibose adenine
  modified_base 18: mod_base = gm
  modified_base 19: mod_base = OTHER; note = 2-fluororibose adenine
  source 1..19: mol_type = other RNA
aagtttttcattcctcaga

SEQ ID NO: 232 - RNA, 19 nt, synthetic construct
  misc_feature 1..19: note = Synthetic: WV-38458
  misc_feature 1..19: note = Synthetic: SSR-0103838
  modified_base 1: mod_base = cm
  modified_base 2: mod_base = OTHER; note = 2-O-methylribose adenine
  modified_base 3: mod_base = OTHER; note = 2-fluororibose uracil
  modified_base 4: mod_base = um
  modified_base 5: mod_base = OTHER; note = 2-fluororibose cytosine
  modified_base 6: mod_base = cm
  modified_base 7: mod_base = OTHER; note = 2-fluororibose uracil
  modified_base 8: mod_base = OTHER; note = 2-fluororibose cytosine
  modified_base 9: mod_base = OTHER; note = 2-fluororibose adenine
  modified_base 10: mod_base = gm
  modified_base 11: mod_base = OTHER; note = 2-fluororibose adenine
  modified_base 12: mod_base = gm
  modified_base 13: mod_base = OTHER; note = 2-fluororibose guanine
  modified_base 14: mod_base = OTHER; note = 2-O-methylribose adenine
  modified_base 15: mod_base = OTHER; note = 2-fluororibose guanine
  modified_base 16: mod_base = OTHER; note = 2-O-methylribose adenine
  modified_base 17: mod_base = OTHER; note = 2-fluororibose adenine
  modified_base 18: mod_base = OTHER; note = 2-O-methylribose adenine
  modified_base 19: mod_base = OTHER; note = 2-fluororibose adenine
  source 1..19: mol_type = other RNA
cattcctcagaggagaaaa

SEQ ID NO: 233 - RNA, 19 nt, synthetic construct
  misc_feature 1..19: note = Synthetic: WV-38459
  misc_feature 1..19: note = Synthetic: SSR-0103861
  modified_base 1: mod_base = cm
  modified_base 2: mod_base = um
  modified_base 3: mod_base = OTHER; note = 2-fluororibose cytosine
  modified_base 4: mod_base = OTHER; note = 2-O-methylribose adenine
  modified_base 5: mod_base = OTHER; note = 2-fluororibose guanine
  modified_base 6: mod_base = OTHER; note = 2-O-methylribose adenine
  modified_base 7: mod_base = OTHER; note = 2-fluororibose guanine
  modified_base 8: mod_base = OTHER; note = 2-fluororibose guanine
  modified_base 9: mod_base = OTHER; note = 2-fluororibose adenine
  modified_base 10: mod_base = gm
  modified_base 11: mod_base = OTHER; note = 2-fluororibose adenine
  modified_base 12: mod_base = OTHER; note = 2-O-methylribose adenine
  modified_base 13: mod_base = OTHER; note = 2-fluororibose adenine
  modified_base 14: mod_base = OTHER; note = 2-O-methylribose adenine
  modified_base 15: mod_base = OTHER; note = 2-fluororibose uracil
  modified_base 16: mod_base = cm
  modified_base 17: mod_base = OTHER; note = 2-fluororibose uracil
  modified_base 18: mod_base = gm
  modified_base 19: mod_base = OTHER; note = 2-fluororibose adenine
  source 1..19: mol_type = other RNA
ctcagaggagaaaatctga

SEQ ID NO: 234 - RNA, 19 nt, synthetic construct
  misc_feature 1..19: note = Synthetic: WV-38460
  misc_feature 1..19: note = Synthetic: SSR-0103929
  modified_base 1: mod_base = gm
  modified_base 2: mod_base = gm
  modified_base 3: mod_base = OTHER; note = 2-fluororibose guanine
  modified_base 4: mod_base = OTHER; note = 2-O-methylribose adenine
  modified_base 5: mod_base = OTHER; note = 2-fluororibose guanine
  modified_base 6: mod_base = OTHER; note = 2-O-methylribose adenine
  modified_base 7: mod_base = OTHER; note = 2-fluororibose uracil
  modified_base 8: mod_base = OTHER; note = 2-fluororibose uracil
  modified_base 9: mod_base = OTHER; note = 2-fluororibose guanine
  modified_base 10: mod_base = um
  modified_base 11: mod_base = OTHER; note = 2-fluororibose uracil
  modified_base 12: mod_base = cm
  modified_base 13: mod_base = OTHER; note = 2-fluororibose uracil
  modified_base 14: mod_base = cm
  modified_base 15: mod_base = OTHER; note = 2-fluororibose adenine
  modified_base 16: mod_base = um
  modified_base 17: mod_base = OTHER; note = 2-fluororibose uracil
  modified_base 18: mod_base = OTHER; note = 2-O-methylribose adenine
  modified_base 19: mod_base = OTHER; note = 2-fluororibose adenine
  source 1..19: mol_type = other RNA
gggagattgttctcattaa

SEQ ID NO: 235 - RNA, 19 nt, synthetic construct
  misc_feature 1..19: note = Synthetic: WV-38461
  misc_feature 1..19: note = Synthetic: SSR-0103922
  modified_base 1: mod_base = gm
  modified_base 2: mod_base = gm
  modified_base 3: mod_base = OTHER; note = 2-fluororibose adenine
  modified_base 4: mod_base = gm
  modified_base 5: mod_base = OTHER; note = 2-fluororibose adenine
  modified_base 6: mod_base = um
  modified_base 7: mod_base = OTHER; note = 2-fluororibose uracil
  modified_base 8: mod_base = OTHER; note = 2-fluororibose guanine
  modified_base 9: mod_base = OTHER; note = 2-fluororibose uracil
  modified_base 10: mod_base = um
  modified_base 11: mod_base = OTHER; note = 2-fluororibose cytosine
  modified_base 12: mod_base = um
  modified_base 13: mod_base = OTHER; note = 2-fluororibose cytosine
  modified_base 14: mod_base = OTHER; note = 2-O-methylribose adenine
  modified_base 15: mod_base = OTHER; note = 2-fluororibose uracil
  modified_base 16: mod_base = um
  modified_base 17: mod_base = OTHER; note = 2-fluororibose adenine
  modified_base 18: mod_base = cm
  modified_base 19: mod_base = OTHER; note = 2-fluororibose adenine
  source 1..19: mol_type = other RNA
ggagattgttctcattaca

SEQ ID NO: 236 - RNA, 19 nt, synthetic construct
  misc_feature 1..19: note = Synthetic: WV-38462
  misc_feature 1..19: note = Synthetic: SSR-0103896
  modified_base 1: mod_base = gm
  modified_base 2: mod_base = OTHER; note = 2-O-methylribose adenine
  modified_base 3: mod_base = OTHER; note = 2-fluororibose guanine
  modified_base 4: mod_base = OTHER; note = 2-O-methylribose adenine
  modified_base 5: mod_base = OTHER; note = 2-fluororibose uracil
  modified_base 6: mod_base = um
  modified_base 7: mod_base = OTHER; note = 2-fluororibose guanine
  modified_base 8: mod_base = OTHER; note = 2-fluororibose uracil
  modified_base 9: mod_base = OTHER; note = 2-fluororibose uracil
  modified_base 10: mod_base = cm
  modified_base 11: mod_base = OTHER; note = 2-fluororibose uracil
  modified_base 12: mod_base = cm
  modified_base 13: mod_base = OTHER; note = 2-fluororibose adenine
  modified_base 14: mod_base = um
  modified_base 15: mod_base = OTHER; note = 2-fluororibose uracil
  modified_base 16: mod_base = OTHER; note = 2-O-methylribose adenine
  modified_base 17: mod_base = OTHER; note = 2-fluororibose cytosine
  modified_base 18: mod_base = um
  modified_base 19: mod_base = OTHER; note = 2-fluororibose adenine
  source 1..19: mol_type = other RNA
gagattgttctcattacta

SEQ ID NO: 237 - RNA, 19 nt, synthetic construct
  misc_feature 1..19: note = Synthetic: WV-38463
  misc_feature 1..19: note = Synthetic: SSR-0103902
  modified_base 1: mod_base = gm
  modified_base 2: mod_base = OTHER; note = 2-O-methylribose adenine
  modified_base 3: mod_base = OTHER; note = 2-fluororibose uracil
  modified_base 4: mod_base = um
  modified_base 5: mod_base = OTHER; note = 2-fluororibose guanine
  modified_base 6: mod_base = um
  modified_base 7: mod_base = OTHER; note = 2-fluororibose uracil
  modified_base 8: mod_base = OTHER; note = 2-fluororibose cytosine
  modified_base 9: mod_base = OTHER; note = 2-fluororibose uracil
  modified_base 10: mod_base = cm
  modified_base 11: mod_base = OTHER; note = 2-fluororibose adenine
  modified_base 12: mod_base = um
  modified_base 13: mod_base = OTHER; note = 2-fluororibose uracil
  modified_base 14: mod_base = OTHER; note = 2-O-methylribose adenine
  modified_base 15: mod_base = OTHER; note = 2-fluororibose cytosine
  modified_base 16: mod_base = um
  modified_base 17: mod_base = OTHER; note = 2-fluororibose guanine
  modified_base 18: mod_base = gm
  modified_base 19: mod_base = OTHER; note = 2-fluororibose adenine
  source 1..19: mol_type = other RNA
gattgttctcattactgga

SEQ ID NO: 238 - RNA, 19 nt, synthetic construct
  misc_feature 1..19: note = Synthetic: WV-38464
  misc_feature 1..19: note = Synthetic: SSR-0103916
  modified_base 1: mod_base = gm
  modified_base 2: mod_base = gm
  modified_base 3: mod_base = OTHER; note = 2-fluororibose adenine
  modified_base 4: mod_base = OTHER; note = 2-O-methylribose adenine
  modified_base 5: mod_base = OTHER; note = 2-fluororibose uracil
  modified_base 6: mod_base = OTHER; note = 2-O-methylribose adenine
  modified_base 7: mod_base = OTHER; note = 2-fluororibose guanine
  modified_base 8: mod_base = OTHER; note = 2-fluororibose guanine
  modified_base 9: mod_base = OTHER; note = 2-fluororibose cytosine
  modified_base 10: mod_base = OTHER; note = 2-O-methylribose adenine
  modified_base 11: mod_base = OTHER; note = 2-fluororibose guanine
  modified_base 12: mod_base = gm
  modified_base 13: mod_base = OTHER; note = 2-fluororibose cytosine
  modified_base 14: mod_base = OTHER; note = 2-O-methylribose adenine
  modified_base 15: mod_base = OTHER; note = 2-fluororibose guanine
  modified_base 16: mod_base = OTHER; note = 2-O-methylribose adenine
  modified_base 17: mod_base = OTHER; note = 2-fluororibose cytosine
  modified_base 18: mod_base = um
  modified_base 19: mod_base = OTHER; note = 2-fluororibose adenine
  source 1..19: mol_type = other RNA
ggaataggcaggcagacta

SEQ ID NO: 239 - RNA, 19 nt, synthetic construct
  misc_feature 1..19: note = Synthetic: WV-38465
  misc_feature 1..19: note = Synthetic: SSR-0103885
  modified_base 1: mod_base = gm
  modified_base 2: mod_base = OTHER; note = 2-O-methylribose adenine
  modified_base 3: mod_base = OTHER; note = 2-fluororibose adenine
  modified_base 4: mod_base = um
  modified_base 5: mod_base = OTHER; note = 2-fluororibose adenine
  modified_base 6: mod_base = gm
  modified_base 7: mod_base = OTHER; note = 2-fluororibose guanine
  modified_base 8: mod_base = OTHER; note = 2-fluororibose cytosine
  modified_base 9: mod_base = OTHER; note = 2-fluororibose adenine
  modified_base 10: mod_base = gm
  modified_base 11: mod_base = OTHER; note = 2-fluororibose guanine
  modified_base 12: mod_base = cm
  modified_base 13: mod_base = OTHER; note = 2-fluororibose adenine
  modified_base 14: mod_base = gm
  modified_base 15: mod_base = OTHER; note = 2-fluororibose adenine
  modified_base 16: mod_base = cm
  modified_base 17: mod_base = OTHER; note = 2-fluororibose uracil
  modified_base 18: mod_base = OTHER; note = 2-O-methylribose adenine
  modified_base 19: mod_base = OTHER; note = 2-fluororibose adenine
  source 1..19: mol_type = other RNA
gaataggcaggcagactaa

SEQ ID NO: 240 - RNA, 19 nt, synthetic construct
  misc_feature 1..19: note = Synthetic: WV-38466
  misc_feature 1..19: note = Synthetic: SSR-0103934
  modified_base 1: mod_base = gm
  modified_base 2: mod_base = gm
  modified_base 3: mod_base = OTHER; note = 2-fluororibose uracil
  modified_base 4: mod_base = um
  modified_base 5: mod_base = OTHER; note = 2-fluororibose cytosine
  modified_base 6: mod_base = um
  modified_base 7: mod_base = OTHER; note = 2-fluororibose guanine
  modified_base 8: mod_base = OTHER; note = 2-fluororibose uracil
  modified_base 9: mod_base = OTHER; note = 2-fluororibose guanine
  modified_base 10: mod_base = gm
  modified_base 11: mod_base = OTHER; note = 2-fluororibose guanine
  modified_base 12: mod_base = OTHER; note = 2-O-methylribose adenine
  modified_base 13: mod_base = OTHER; note = 2-fluororibose uracil
  modified_base 14: mod_base = OTHER; note = 2-O-methylribose adenine
  modified_base 15: mod_base = OTHER; note = 2-fluororibose uracil
  modified_base 16: mod_base = um
  modified_base 17: mod_base = OTHER; note = 2-fluororibose adenine
  modified_base 18: mod_base = OTHER; note = 2-O-methylribose adenine
  modified_base 19: mod_base = OTHER; note = 2-fluororibose adenine
  source 1..19: mol_type = other RNA
ggttctgtgggatattaaa

SEQ ID NO: 241 - RNA, 19 nt, synthetic construct
  misc_feature 1..19: note = Synthetic: WV-38467
  misc_feature 1..19: note = Synthetic: SSR-0103952
  modified_base 1: mod_base = um
  modified_base 2: mod_base = gm
  modified_base 3: mod_base = OTHER; note = 2-fluororibose adenine
  modified_base 4: mod_base = OTHER; note = 2-O-methylribose adenine
  modified_base 5: mod_base = OTHER; note = 2-fluororibose guanine
  modified_base 6: mod_base = OTHER; note = 2-O-methylribose adenine
  modified_base 7: mod_base = OTHER; note = 2-fluororibose adenine
  modified_base 8: mod_base = OTHER; note = 2-fluororibose adenine
  modified_base 9: mod_base = OTHER; note = 2-fluororibose guanine
  modified_base 10: mod_base = OTHER; note = 2-O-methylribose adenine
  modified_base 11: mod_base = OTHER; note = 2-fluororibose adenine
  modified_base 12: mod_base = gm
  modified_base 13: mod_base = OTHER; note = 2-fluororibose uracil
  modified_base 14: mod_base = gm
  modified_base 15: mod_base = OTHER; note = 2-fluororibose guanine
  modified_base 16: mod_base = gm
  modified_base 17: mod_base = OTHER; note = 2-fluororibose uracil
  modified_base 18: mod_base = gm
  modified_base 19: mod_base = OTHER; note = 2-fluororibose adenine
  source 1..19: mol_type = other RNA
tgaagaaagaagtgggtga

SEQ ID NO: 242 - RNA, 19 nt, synthetic construct
  misc_feature 1..19: note = Synthetic: WV-38468
  misc_feature 1..19: note = Synthetic: SSR-0103876
  modified_base 1: mod_base = gm
  modified_base 2: mod_base = OTHER; note = 2-O-methylribose adenine
  modified_base 3: mod_base = OTHER; note = 2-fluororibose adenine
  modified_base 4: mod_base = gm
  modified_base 5: mod_base = OTHER; note = 2-fluororibose adenine
  modified_base 6: mod_base = OTHER; note = 2-O-methylribose adenine
  modified_base 7: mod_base = OTHER; note = 2-fluororibose adenine
  modified_base 8: mod_base = OTHER; note = 2-fluororibose guanine
  modified_base 9: mod_base = OTHER; note = 2-fluororibose adenine
  modified_base 10: mod_base = OTHER; note = 2-O-methylribose adenine
  modified_base 11: mod_base = OTHER; note = 2-fluororibose guanine
  modified_base 12: mod_base = um
  modified_base 13: mod_base = OTHER; note = 2-fluororibose guanine
  modified_base 14: mod_base = gm
  modified_base 15: mod_base = OTHER; note = 2-fluororibose guanine
  modified_base 16: mod_base = um
  modified_base 17: mod_base = OTHER; note = 2-fluororibose guanine
  modified_base 18: mod_base = OTHER; note = 2-O-methylribose adenine
  modified_base 19: mod_base = OTHER; note = 2-fluororibose adenine
  source 1..19: mol_type = other RNA
gaagaaagaagtgggtgaa

SEQ ID NO: 243 - RNA, 19 nt, synthetic construct
  misc_feature 1..19: note = Synthetic: WV-38469
  misc_feature 1..19: note = Synthetic: SSR-0103873
  modified_base 1: mod_base = gm
  modified_base 2: mod_base = OTHER; note = 2-O-methylribose adenine
  modified_base 3: mod_base = OTHER; note = 2-fluororibose adenine
  modified_base 4: mod_base = OTHER; note = 2-O-methylribose adenine
  modified_base 5: mod_base = OTHER; note = 2-fluororibose guanine
  modified_base 6: mod_base = OTHER; note = 2-O-methylribose adenine
  modified_base 7: mod_base = OTHER; note = 2-fluororibose adenine
  modified_base 8: mod_base = OTHER; note = 2-fluororibose guanine
  modified_base 9: mod_base = OTHER; note = 2-fluororibose uracil
  modified_base 10: mod_base = gm
  modified_base 11: mod_base = OTHER; note = 2-fluororibose guanine
  modified_base 12: mod_base = gm
  modified_base 13: mod_base = OTHER; note = 2-fluororibose uracil
  modified_base 14: mod_base = gm
  modified_base 15: mod_base = OTHER; note = 2-fluororibose adenine
  modified_base 16: mod_base = um
  modified_base 17: mod_base = OTHER; note = 2-fluororibose guanine
  modified_base 18: mod_base = um
  modified_base 19: mod_base = OTHER; note = 2-fluororibose adenine
  source 1..19: mol_type = other RNA
gaaagaagtgggtgatgta

SEQ ID NO: 244 - RNA, 19 nt, synthetic construct
  misc_feature 1..19: note = Synthetic: WV-38470
  misc_feature 1..19: note = Synthetic: SSR-0103767
  modified_base 1: mod_base = OTHER; note = 2-O-methylribose adenine
  modified_base 2: mod_base = OTHER; note = 2-O-methylribose adenine
  modified_base 3: mod_base = OTHER; note = 2-fluororibose adenine
  modified_base 4: mod_base = gm
  modified_base 5: mod_base = OTHER; note = 2-fluororibose adenine
  modified_base 6: mod_base = OTHER; note = 2-O-methylribose adenine
  modified_base 7: mod_base = OTHER; note = 2-fluororibose guanine
  modified_base 8: mod_base = OTHER; note = 2-fluororibose uracil
  modified_base 9: mod_base = OTHER; note = 2-fluororibose guanine
  modified_base 10: mod_base = gm
  modified_base 11: mod_base = OTHER; note = 2-fluororibose guanine
  modified_base 12: mod_base = um
  modified_base 13: mod_base = OTHER; note = 2-fluororibose guanine
  modified_base 14: mod_base = OTHER; note = 2-O-methylribose adenine
  modified_base 15: mod_base = OTHER; note = 2-fluororibose uracil
  modified_base 16: mod_base = gm
  modified_base 17: mod_base = OTHER; note = 2-fluororibose uracil
  modified_base 18: mod_base = OTHER; note = 2-O-methylribose adenine
  modified_base 19: mod_base = OTHER; note = 2-fluororibose adenine
  source 1..19: mol_type = other RNA
aaagaagtgggtgatgtaa

SEQ ID NO: 245 - RNA, 19 nt, synthetic construct
  misc_feature 1..19: note = Synthetic: WV-38471
  misc_feature 1..19: note = Synthetic: SSR-0103795
  modified_base 1: mod_base = OTHER; note = 2-O-methylribose adenine
  modified_base 2: mod_base = gm
  modified_base 3: mod_base = OTHER; note = 2-fluororibose adenine
  modified_base 4: mod_base = OTHER; note = 2-O-methylribose adenine
  modified_base 5: mod_base = OTHER; note = 2-fluororibose guanine
  modified_base 6: mod_base = um
  modified_base 7: mod_base = OTHER; note = 2-fluororibose guanine
  modified_base 8: mod_base = OTHER; note = 2-fluororibose guanine
  modified_base 9: mod_base = OTHER; note = 2-fluororibose guanine
  modified_base 10: mod_base = um
  modified_base 11: mod_base = OTHER; note = 2-fluororibose guanine
  modified_base 12: mod_base = OTHER; note = 2-O-methylribose adenine
  modified_base 13: mod_base = OTHER; note = 2-fluororibose uracil
  modified_base 14: mod_base = gm
  modified_base 15: mod_base = OTHER; note = 2-fluororibose uracil
  modified_base 16: mod_base = OTHER; note = 2-O-methylribose adenine
  modified_base 17: mod_base = OTHER; note = 2-fluororibose adenine
  modified_base 18: mod_base = cm
  modified_base 19: mod_base = OTHER; note = 2-fluororibose adenine
  source 1..19: mol_type = other RNA
agaagtgggtgatgtaaca

SEQ ID NO: 246 - RNA, 19 nt, synthetic construct
  misc_feature 1..19: note = Synthetic: WV-38472
  misc_feature 1..19: note = Synthetic: SSR-0103881
  modified_base 1: mod_base = gm
  modified_base 2: mod_base = OTHER; note = 2-O-methylribose adenine
  modified_base 3: mod_base = OTHER; note = 2-fluororibose adenine
  modified_base 4: mod_base = gm
  modified_base 5: mod_base = OTHER; note = 2-fluororibose uracil
  modified_base 6: mod_base = gm
  modified_base 7: mod_base = OTHER; note = 2-fluororibose guanine
  modified_base 8: mod_base = OTHER; note = 2-fluororibose guanine
  modified_base 9: mod_base = OTHER; note = 2-fluororibose uracil
  modified_base 10: mod_base = gm
  modified_base 11: mod_base = OTHER; note = 2-fluororibose adenine
  modified_base 12: mod_base = um
  modified_base 13: mod_base = OTHER; note = 2-fluororibose guanine
  modified_base 14: mod_base = um
  modified_base 15: mod_base = OTHER; note = 2-fluororibose adenine
  modified_base 16: mod_base = OTHER; note = 2-O-methylribose adenine
  modified_base 17: mod_base = OTHER; note = 2-fluororibose cytosine
  modified_base 18: mod_base = OTHER; note = 2-O-methylribose adenine
  modified_base 19: mod_base = OTHER; note = 2-fluororibose adenine
  source 1..19: mol_type = other RNA
gaagtgggtgatgtaacaa

SEQ ID NO: 247 - RNA, 19 nt, synthetic construct
  misc_feature 1..19: note = Synthetic: WV-38473
  misc_feature 1..19: note = Synthetic: SSR-0103778
  modified_base 1: mod_base = OTHER; note = 2-O-methylribose adenine
  modified_base 2: mod_base = OTHER; note = 2-O-methylribose adenine
  modified_base 3: mod_base = OTHER; note = 2-fluororibose guanine
  modified_base 4: mod_base = um
  modified_base 5: mod_base = OTHER; note = 2-fluororibose guanine
  modified_base 6: mod_base = gm
  modified_base 7: mod_base = OTHER; note = 2-fluororibose guanine
  modified_base 8: mod_base = OTHER; note = 2-fluororibose uracil
  modified_base 9: mod_base = OTHER; note = 2-fluororibose guanine
  modified_base 10: mod_base = OTHER; note = 2-O-methylribose adenine
  modified_base 11: mod_base = OTHER; note = 2-fluororibose uracil
  modified_base 12: mod_base = gm
  modified_base 13: mod_base = OTHER; note = 2-fluororibose uracil
  modified_base 14: mod_base = OTHER; note = 2-O-methylribose adenine
  modified_base 15: mod_base = OTHER; note = 2-fluororibose adenine
  modified_base 16: mod_base = cm
  modified_base 17: mod_base = OTHER; note = 2-fluororibose adenine
  modified_base 18: mod_base = OTHER; note = 2-O-methylribose adenine
  modified_base 19: mod_base = OTHER; note = 2-fluororibose adenine
  source 1..19: mol_type = other RNA
aagtgggtgatgtaacaaa

SEQ ID NO: 248 - RNA, 19 nt, synthetic construct
  misc_feature 1..19: note = Synthetic: WV-38474
  misc_feature 1..19: note = Synthetic: SSR-0103900
  modified_base 1: mod_base = gm
  modified_base 2: mod_base = OTHER; note = 2-O-methylribose adenine
  modified_base 3: mod_base = OTHER; note = 2-fluororibose uracil
  modified_base 4: mod_base = gm
  modified_base 5: mod_base = OTHER; note = 2-fluororibose uracil
  modified_base 6: mod_base = OTHER; note = 2-O-methylribose adenine
  modified_base 7: mod_base = OTHER; note = 2-fluororibose adenine
  modified_base 8: mod_base = OTHER; note = 2-fluororibose cytosine
  modified_base 9: mod_base = OTHER; note = 2-fluororibose adenine
  modified_base 10: mod_base = OTHER; note = 2-O-methylribose adenine
  modified_base 11: mod_base = OTHER; note = 2-fluororibose uracil
  modified_base 12: mod_base = cm
  modified_base 13: mod_base = OTHER; note = 2-fluororibose guanine
  modified_base 14: mod_base = um
  modified_base 15: mod_base = OTHER; note = 2-fluororibose guanine
  modified_base 16: mod_base = gm
  modified_base 17: mod_base = OTHER; note = 2-fluororibose uracil
  modified_base 18: mod_base = gm
  modified_base 19: mod_base = OTHER; note = 2-fluororibose adenine
  source 1..19: mol_type = other RNA
gatgtaacaatcgtggtga

SEQ ID NO: 249 - RNA, 19 nt, synthetic construct
  misc_feature 1..19: note = Synthetic: WV-38475
  misc_feature 1..19: note = Synthetic: SSR-0103937
  modified_base 1: mod_base = gm
  modified_base 2: mod_base = um
  modified_base 3: mod_base = OTHER; note = 2-fluororibose adenine
  modified_base 4: mod_base = OTHER; note = 2-O-methylribose adenine
  modified_base 5: mod_base = OTHER; note = 2-fluororibose cytosine
  modified_base 6: mod_base = OTHER; note = 2-O-methylribose adenine
  modified_base 7: mod_base = OTHER; note = 2-fluororibose adenine
  modified_base 8: mod_base = OTHER; note = 2-fluororibose uracil
  modified_base 9: mod_base = OTHER; note = 2-fluororibose cytosine
  modified_base 10: mod_base = gm
  modified_base 11: mod_base = OTHER; note = 2-fluororibose uracil
  modified_base 12: mod_base = gm
  modified_base 13: mod_base = OTHER; note = 2-fluororibose guanine
  modified_base 14: mod_base = um
  modified_base 15: mod_base = OTHER; note = 2-fluororibose guanine
  modified_base 16: mod_base = OTHER; note = 2-O-methylribose adenine
  modified_base 17: mod_base = OTHER; note = 2-fluororibose adenine
  modified_base 18: mod_base = um
  modified_base 19: mod_base = OTHER; note = 2-fluororibose adenine
  source 1..19: mol_type = other RNA
gtaacaatcgtggtgaata

SEQ ID NO: 250 - RNA, 19 nt, synthetic construct
  misc_feature 1..19: note = Synthetic: WV-38476
  misc_feature 1..19: note = Synthetic: SSR-0103942
  modified_base 1: mod_base = um
  modified_base 2: mod_base = OTHER; note = 2-O-methylribose adenine
  modified_base 3: mod_base = OTHER; note = 2-fluororibose adenine
  modified_base 4: mod_base = cm
  modified_base 5: mod_base = OTHER; note = 2-fluororibose adenine
  modified_base 6: mod_base = OTHER; note = 2-O-methylribose adenine
  modified_base 7: mod_base = OTHER; note = 2-fluororibose uracil
  modified_base 8: mod_base = OTHER; note = 2-fluororibose cytosine
  modified_base 9: mod_base = OTHER; note = 2-fluororibose guanine
  modified_base 10: mod_base = um
  modified_base 11: mod_base = OTHER; note = 2-fluororibose guanine
  modified_base 12: mod_base = gm
  modified_base 13: mod_base = OTHER; note = 2-fluororibose uracil
  modified_base 14: mod_base = gm
  modified_base 15: mod_base = OTHER; note = 2-fluororibose adenine
  modified_base 16: mod_base = OTHER; note = 2-O-methylribose adenine
  modified_base 17: mod_base = OTHER; note = 2-fluororibose uracil
  modified_base 18: mod_base = OTHER; note = 2-O-methylribose adenine
  modified_base 19: mod_base = OTHER; note = 2-fluororibose adenine
  source 1..19: mol_type = other RNA
taacaatcgtggtgaataa

SEQ ID NO: 251 - RNA, 19 nt, synthetic construct
  misc_feature 1..19: note = Synthetic: WV-38477
  misc_feature 1..19: note = Synthetic: SSR-0103932
  modified_base 1: mod_base = gm
  modified_base 2: mod_base = gm
  modified_base 3: mod_base = OTHER; note = 2-fluororibose uracil
  modified_base 4: mod_base = gm
  modified_base 5: mod_base = OTHER; note = 2-fluororibose adenine
  modified_base 6: mod_base = OTHER; note = 2-O-methylribose adenine
  modified_base 7: mod_base = OTHER; note = 2-fluororibose uracil
  modified_base 8: mod_base = OTHER; note = 2-fluororibose adenine
  modified_base 9: mod_base = OTHER; note = 2-fluororibose adenine
  modified_base 10: mod_base = um
  modified_base 11: mod_base = OTHER; note = 2-fluororibose guanine
  modified_base 12: mod_base = cm
  modified_base 13: mod_base = OTHER; note = 2-fluororibose uracil
  modified_base 14: mod_base = gm
  modified_base 15: mod_base = OTHER; note = 2-fluororibose guanine
  modified_base 16: mod_base = gm
  modified_base 17: mod_base = OTHER; note = 2-fluororibose adenine
  modified_base 18: mod_base = cm
  modified_base 19: mod_base = OTHER; note = 2-fluororibose adenine
  source 1..19: mol_type = other RNA
ggtgaataatgctgggaca

SEQ ID NO: 252 - RNA, 19 nt, synthetic construct
  misc_feature 1..19: note = Synthetic: WV-38478
  misc_feature 1..19: note = Synthetic: SSR-0103882
  modified_base 1: mod_base = gm
  modified_base 2: mod_base = OTHER; note = 2-O-methylribose adenine
  modified_base 3: mod_base = OTHER; note = 2-fluororibose adenine
  modified_base 4: mod_base = um
  modified_base 5: mod_base = OTHER; note = 2-fluororibose adenine
  modified_base 6: mod_base = OTHER; note = 2-O-methylribose adenine
  modified_base 7: mod_base = OTHER; note = 2-fluororibose uracil
  modified_base 8: mod_base = OTHER; note = 2-fluororibose guanine
  modified_base 9: mod_base = OTHER; note = 2-fluororibose cytosine
  modified_base 10: mod_base = um
  modified_base 11: mod_base = OTHER; note = 2-fluororibose guanine
  modified_base 12: mod_base = gm
  modified_base 13: mod_base = OTHER; note = 2-fluororibose guanine
  modified_base 14: mod_base = OTHER; note = 2-O-methylribose adenine
  modified_base 15: mod_base = OTHER; note = 2-fluororibose cytosine
  modified_base 16: mod_base = OTHER; note = 2-O-methylribose adenine
  modified_base 17: mod_base = OTHER; note = 2-fluororibose guanine
  modified_base 18: mod_base = um
  modified_base 19: mod_base = OTHER; note = 2-fluororibose adenine
  source 1..19: mol_type = other RNA
gaataatgctgggacagta

SEQ ID NO: 253 - RNA, 19 nt, synthetic construct
  misc_feature 1..19: note = Synthetic: WV-38479
  misc_feature 1..19: note = Synthetic: SSR-0103780
  modified_base 1: mod_base = OTHER; note = 2-O-methylribose adenine
  modified_base 2: mod_base = OTHER; note = 2-O-methylribose adenine
  modified_base 3: mod_base = OTHER; note = 2-fluororibose uracil
  modified_base 4: mod_base = OTHER; note = 2-O-methylribose adenine
  modified_base 5: mod_base = OTHER; note = 2-fluororibose adenine
  modified_base 6: mod_base = um
  modified_base 7: mod_base = OTHER; note = 2-fluororibose guanine
  modified_base 8: mod_base = OTHER; note = 2-fluororibose cytosine
  modified_base 9: mod_base = OTHER; note = 2-fluororibose uracil
  modified_base 10: mod_base = gm
  modified_base 11: mod_base = OTHER; note = 2-fluororibose guanine
  modified_base 12: mod_base = gm
  modified_base 13: mod_base = OTHER; note = 2-fluororibose adenine
  modified_base 14: mod_base = cm
  modified_base 15: mod_base = OTHER; note = 2-fluororibose adenine
  modified_base 16: mod_base = gm
  modified_base 17: mod_base = OTHER; note = 2-fluororibose uracil
  modified_base 18: mod_base = OTHER; note = 2-O-methylribose adenine
  modified_base 19: mod_base = OTHER; note = 2-fluororibose adenine
  source 1..19: mol_type = other RNA
aataatgctgggacagtaa

SEQ ID NO: 254 - RNA, 19 nt, synthetic construct
  misc_feature 1..19: note = Synthetic: WV-38480
  misc_feature 1..19: note = Synthetic: SSR-0103813
  modified_base 1: mod_base = OTHER; note = 2-O-methylribose adenine
  modified_base 2: mod_base = um
  modified_base 3: mod_base = OTHER; note = 2-fluororibose adenine
  modified_base 4: mod_base = OTHER; note = 2-O-methylribose adenine
  modified_base 5: mod_base = OTHER; note = 2-fluororibose uracil
  modified_base 6: mod_base = gm
  modified_base 7: mod_base = OTHER; note = 2-fluororibose cytosine
  modified_base 8: mod_base = OTHER; note = 2-fluororibose uracil
  modified_base 9: mod_base = OTHER; note = 2-fluororibose guanine
  modified_base 10: mod_base = gm
  modified_base 11: mod_base = OTHER; note = 2-fluororibose guanine
  modified_base 12: mod_base = OTHER; note = 2-O-methylribose adenine
  modified_base 13: mod_base = OTHER; note = 2-fluororibose cytosine
  modified_base 14: mod_base = OTHER; note = 2-O-methylribose adenine
  modified_base 15: mod_base = OTHER; note = 2-fluororibose guanine
  modified_base 16: mod_base = um
  modified_base 17: mod_base = OTHER; note = 2-fluororibose adenine
  modified_base 18: mod_base = um
  modified_base 19: mod_base = OTHER; note = 2-fluororibose adenine
  source 1..19: mol_type = other RNA
ataatgctgggacagtata

SEQ ID NO: 255 - RNA, 19 nt, synthetic construct
  misc_feature 1..19: note = Synthetic: WV-38481
  misc_feature 1..19: note = Synthetic: SSR-0103918
  modified_base 1: mod_base = gm
  modified_base 2: mod_base = gm
  modified_base 3: mod_base = OTHER; note = 2-fluororibose adenine
  modified_base 4: mod_base = cm
  modified_base 5: mod_base = OTHER; note = 2-fluororibose adenine
  modified_base 6: mod_base = gm
  modified_base 7: mod_base = OTHER; note = 2-fluororibose uracil
  modified_base 8: mod_base = OTHER; note = 2-fluororibose adenine
  modified_base 9: mod_base = OTHER; note = 2-fluororibose uracil
  modified_base 10: mod_base = OTHER; note = 2-O-methylribose adenine
  modified_base 11: mod_base = OTHER; note = 2-fluororibose uracil
  modified_base 12: mod_base = cm
  modified_base 13: mod_base = OTHER; note = 2-fluororibose cytosine
  modified_base 14: mod_base = OTHER; note = 2-O-methylribose adenine
  modified_base 15: mod_base = OTHER; note = 2-fluororibose guanine
  modified_base 16: mod_base = cm
  modified_base 17: mod_base = OTHER; note = 2-fluororibose cytosine
  modified_base 18: mod_base = gm
  modified_base 19: mod_base = OTHER; note = 2-fluororibose adenine
  source 1..19: mol_type = other RNA
ggacagtatatccagccga

SEQ ID NO: 256 - RNA, 19 nt, synthetic construct
  misc_feature 1..19: note = Synthetic: WV-38482
  misc_feature 1..19: note = Synthetic: SSR-0103891
  modified_base 1: mod_base = gm
  modified_base 2: mod_base = OTHER; note = 2-O-methylribose adenine
  modified_base 3: mod_base = OTHER; note = 2-fluororibose cytosine
  modified_base 4: mod_base = OTHER; note = 2-O-methylribose adenine
  modified_base 5: mod_base = OTHER; note = 2-fluororibose guanine
  modified_base 6: mod_base = um
  modified_base 7: mod_base = OTHER; note = 2-fluororibose adenine
  modified_base 8: mod_base = OTHER; note = 2-fluororibose uracil
  modified_base 9: mod_base = OTHER; note = 2-fluororibose adenine
  modified_base 10: mod_base = um
  modified_base 11: mod_base = OTHER; note = 2-fluororibose cytosine
  modified_base 12: mod_base = cm
  modified_base 13: mod_base = OTHER; note = 2-fluororibose adenine
  modified_base 14: mod_base = gm
  modified_base 15: mod_base = OTHER; note = 2-fluororibose cytosine
  modified_base 16: mod_base = cm
  modified_base 17: mod_base = OTHER; note = 2-fluororibose guanine
  modified_base 18: mod_base = OTHER; note = 2-O-methylribose adenine
  modified_base 19: mod_base = OTHER; note = 2-fluororibose adenine
  source 1..19: mol_type = other RNA
gacagtatatccagccgaa

SEQ ID NO: 257 - RNA, 19 nt, synthetic construct
  misc_feature 1..19: note = Synthetic: WV-38483
  misc_feature 1..19: note = Synthetic: SSR-0103833
  modified_base 1: mod_base = cm
  modified_base 2: mod_base = OTHER; note = 2-O-methylribose adenine
  modified_base 3: mod_base = OTHER; note = 2-fluororibose guanine
  modified_base 4: mod_base = um
  modified_base 5: mod_base = OTHER; note = 2-fluororibose adenine
  modified_base 6: mod_base = um
  modified_base 7: mod_base = OTHER; note = 2-fluororibose adenine
  modified_base 8: mod_base = OTHER; note = 2-fluororibose uracil
  modified_base 9: mod_base = OTHER; note = 2-fluororibose cytosine
  modified_base 10: mod_base = cm
  modified_base 11: mod_base = OTHER; note = 2-fluororibose adenine
  modified_base 12: mod_base = gm
  modified_base 13: mod_base = OTHER; note = 2-fluororibose cytosine
  modified_base 14: mod_base = cm
  modified_base 15: mod_base = OTHER; note = 2-fluororibose guanine
  modified_base 16: mod_base = OTHER; note = 2-O-methylribose adenine
  modified_base 17: mod_base = OTHER; note = 2-fluororibose uracil
  modified_base 18: mod_base = cm
  modified_base 19: mod_base = OTHER; note = 2-fluororibose adenine
  source 1..19: mol_type = other RNA
cagtatatccagccgatca

SEQ ID NO: 258 - RNA, 19 nt, synthetic construct
  misc_feature 1..19: note = Synthetic: WV-38484
  misc_feature 1..19: note = Synthetic: SSR-0103811
  modified_base 1: mod_base = OTHER; note = 2-O-methylribose adenine
  modified_base 2: mod_base = gm
  modified_base 3: mod_base = OTHER; note = 2-fluororibose uracil
  modified_base 4: mod_base = OTHER; note = 2-O-methylribose adenine
  modified_base 5: mod_base = OTHER; note = 2-fluororibose uracil
  modified_base 6: mod_base = OTHER; note = 2-O-methylribose adenine
  modified_base 7: mod_base = OTHER; note = 2-fluororibose uracil
  modified_base 8: mod_base = OTHER; note = 2-fluororibose cytosine
  modified_base 9: mod_base = OTHER; note = 2-fluororibose cytosine
  modified_base 10: mod_base = OTHER; note = 2-O-methylribose adenine
  modified_base 11: mod_base = OTHER; note = 2-fluororibose guanine
  modified_base 12: mod_base = cm
  modified_base 13: mod_base = OTHER; note = 2-fluororibose cytosine
  modified_base 14: mod_base = gm
  modified_base 15: mod_base = OTHER; note = 2-fluororibose adenine
  modified_base 16: mod_base = um
  modified_base 17: mod_base = OTHER; note = 2-fluororibose cytosine
  modified_base 18: mod_base = um
  modified_base 19: mod_base = OTHER; note = 2-fluororibose adenine
  source 1..19: mol_type = other RNA
agtatatccagccgatcta

SEQ ID NO: 259 - RNA, 19 nt, synthetic construct
  misc_feature 1..19: note = Synthetic: WV-38485
  misc_feature 1..19: note = Synthetic: SSR-0103905
  modified_base 1: mod_base = gm
  modified_base 2: mod_base = cm
  modified_base 3: mod_base = OTHER; note = 2-fluororibose adenine
  modified_base 4: mod_base = cm
  modified_base 5: mod_base = OTHER; note = 2-fluororibose cytosine
  modified_base 6: mod_base = OTHER; note = 2-O-methylribose adenine
  modified_base 7: mod_base = OTHER; note = 2-fluororibose adenine
  modified_base 8: mod_base = OTHER; note = 2-fluororibose guanine
  modified_base 9: mod_base = OTHER; note = 2-fluororibose guanine
  modified_base 10: mod_base = OTHER; note = 2-O-methylribose adenine
  modified_base 11: mod_base = OTHER; note = 2-fluororibose uracil
  modified_base 12: mod_base = gm
  modified_base 13: mod_base = OTHER; note = 2-fluororibose adenine
  modified_base 14: mod_base = OTHER; note = 2-O-methylribose adenine
  modified_base 15: mod_base = OTHER; note = 2-fluororibose guanine
  modified_base 16: mod_base = OTHER; note = 2-O-methylribose adenine
  modified_base 17: mod_base = OTHER; note = 2-fluororibose guanine
  modified_base 18: mod_base = OTHER; note = 2-O-methylribose adenine
  modified_base 19: mod_base = OTHER; note = 2-fluororibose adenine
  source 1..19: mol_type = other RNA
gcaccaaggatgaagagaa

SEQ ID NO: 260 - RNA, 19 nt, synthetic construct
  misc_feature 1..19: note = Synthetic: WV-38486
  misc_feature 1..19: note = Synthetic: SSR-0103829
  modified_base 1: mod_base = cm
  modified_base 2: mod_base = OTHER; note = 2-O-methylribose adenine
  modified_base 3: mod_base = OTHER; note = 2-fluororibose cytosine
  modified_base 4: mod_base = cm
  modified_base 5: mod_base = OTHER; note = 2-fluororibose adenine
  modified_base 6: mod_base = OTHER; note = 2-O-methylribose adenine
  modified_base 7: mod_base = OTHER; note = 2-fluororibose guanine
  modified_base 8: mod_base = OTHER; note = 2-fluororibose guanine
  modified_base 9: mod_base = OTHER; note = 2-fluororibose adenine
  modified_base 10: mod_base = um
  modified_base 11: mod_base = OTHER; note = 2-fluororibose guanine
  modified_base 12: mod_base = OTHER; note = 2-O-methylribose adenine
  modified_base 13: mod_base = OTHER; note = 2-fluororibose adenine
  modified_base 14: mod_base = gm
  modified_base 15: mod_base = OTHER; note = 2-fluororibose adenine
  modified_base 16: mod_base = gm
  modified_base 17: mod_base = OTHER; note = 2-fluororibose adenine
  modified_base 18: mod_base = um
  modified_base 19: mod_base = OTHER; note = 2-fluororibose adenine
  source 1..19: mol_type = other RNA
caccaaggatgaagagata

SEQ ID NO: 261 - RNA, 19 nt, synthetic construct
  misc_feature 1..19: note = Synthetic: WV-38487
  misc_feature 1..19: note = Synthetic: SSR-0103791
  modified_base 1: mod_base = OTHER; note = 2-O-methylribose adenine
  modified_base 2: mod_base = cm
  modified_base 3: mod_base = OTHER; note = 2-fluororibose cytosine
  modified_base 4: mod_base = OTHER; note = 2-O-methylribose adenine
  modified_base 5: mod_base = OTHER; note = 2-fluororibose adenine
  modified_base 6: mod_base = gm
  modified_base 7: mod_base = OTHER; note = 2-fluororibose guanine
  modified_base 8: mod_base = OTHER; note = 2-fluororibose adenine
  modified_base 9: mod_base = OTHER; note = 2-fluororibose uracil
  modified_base 10: mod_base = gm
  modified_base 11: mod_base = OTHER; note = 2-fluororibose adenine
  modified_base 12: mod_base = OTHER; note = 2-O-methylribose adenine
  modified_base 13: mod_base = OTHER; note = 2-fluororibose guanine
  modified_base 14: mod_base = OTHER; note = 2-O-methylribose adenine
  modified_base 15: mod_base = OTHER; note = 2-fluororibose guanine
  modified_base 16: mod_base = OTHER; note = 2-O-methylribose adenine
  modified_base 17: mod_base = OTHER; note = 2-fluororibose uracil
  modified_base 18: mod_base = um
  modified_base 19: mod_base = OTHER; note = 2-fluororibose adenine
  source 1..19: mol_type = other RNA
accaaggatgaagagatta

SEQ ID NO: 262 - RNA, 19 nt, synthetic construct
  misc_feature 1..19: note = Synthetic: WV-38488
  misc_feature 1..19: note = Synthetic: SSR-0103775
  modified_base 1: mod_base = OTHER; note = 2-O-methylribose adenine
  modified_base 2: mod_base = OTHER; note = 2-O-methylribose adenine
  modified_base 3: mod_base = OTHER; note = 2-fluororibose guanine
  modified_base 4: mod_base = gm
  modified_base 5: mod_base = OTHER; note = 2-fluororibose adenine
  modified_base 6: mod_base = um
  modified_base 7: mod_base = OTHER; note = 2-fluororibose guanine
  modified_base 8: mod_base = OTHER; note = 2-fluororibose adenine
  modified_base 9: mod_base = OTHER; note = 2-fluororibose adenine
  modified_base 10: mod_base = gm
  modified_base 11: mod_base = OTHER; note = 2-fluororibose adenine
  modified_base 12: mod_base = gm
  modified_base 13: mod_base = OTHER; note = 2-fluororibose adenine
  modified_base 14: mod_base = um
  modified_base 15: mod_base = OTHER; note = 2-fluororibose uracil
  modified_base 16: mod_base = OTHER; note = 2-O-methylribose adenine
  modified_base 17: mod_base = OTHER; note = 2-fluororibose cytosine
  modified_base 18: mod_base = cm
  modified_base 19: mod_base = OTHER; note = 2-fluororibose adenine
  source 1..19: mol_type = other RNA
aaggatgaagagattacca

SEQ ID NO: 263 - RNA, 19 nt, synthetic construct
  misc_feature 1..19: note = Synthetic: WV-38489
  misc_feature 1..19: note = Synthetic: SSR-0103807
  modified_base 1: mod_base = OTHER; note = 2-O-methylribose adenine
  modified_base 2: mod_base = gm
  modified_base 3: mod_base = OTHER; note = 2-fluororibose guanine
  modified_base 4: mod_base = OTHER; note = 2-O-methylribose adenine
  modified_base 5: mod_base = OTHER; note = 2-fluororibose uracil
  modified_base 6: mod_base = gm
  modified_base 7: mod_base = OTHER; note = 2-fluororibose adenine
  modified_base 8: mod_base = OTHER; note = 2-fluororibose adenine
  modified_base 9: mod_base = OTHER; note = 2-fluororibose guanine
  modified_base 10: mod_base = OTHER; note = 2-O-methylribose adenine
  modified_base 11: mod_base = OTHER; note = 2-fluororibose guanine
  modified_base 12: mod_base = OTHER; note = 2-O-methylribose adenine
  modified_base 13: mod_base = OTHER; note = 2-fluororibose uracil
  modified_base 14: mod_base = um
  modified_base 15: mod_base = OTHER; note = 2-fluororibose adenine
  modified_base 16: mod_base = cm
  modified_base 17: mod_base = OTHER; note = 2-fluororibose cytosine
  modified_base 18: mod_base = OTHER; note = 2-O-methylribose adenine
  modified_base 19: mod_base = OTHER; note = 2-fluororibose adenine
  source 1..19: mol_type = other RNA
aggatgaagagattaccaa

SEQ ID NO: 264 - RNA, 19 nt, synthetic construct
  misc_feature 1..19: note = Synthetic: WV-38490
  misc_feature 1..19: note = Synthetic: SSR-0103841
  modified_base 1: mod_base = cm
  modified_base 2: mod_base = OTHER; note = 2-O-methylribose adenine
  modified_base 3: mod_base = OTHER; note = 2-fluororibose uracil
  modified_base 4: mod_base = um
  modified_base 5: mod_base = OTHER; note = 2-fluororibose uracil
  modified_base 6: mod_base = gm
  modified_base 7: mod_base = OTHER; note = 2-fluororibose adenine
  modified_base 8: mod_base = OTHER; note = 2-fluororibose guanine
  modified_base 9: mod_base = OTHER; note = 2-fluororibose guanine
  modified_base 10: mod_base = um
  modified_base 11: mod_base = OTHER; note = 2-fluororibose cytosine
  modified_base 12: mod_base = OTHER; note = 2-O-methylribose adenine
  modified_base 13: mod_base = OTHER; note = 2-fluororibose adenine
  modified_base 14: mod_base = cm
  modified_base 15: mod_base = OTHER; note = 2-fluororibose adenine
  modified_base 16: mod_base = um
  modified_base 17: mod_base = OTHER; note = 2-fluororibose cytosine
  modified_base 18: mod_base = cm
  modified_base 19: mod_base = OTHER; note = 2-fluororibose adenine
  source 1..19: mol_type = other RNA
catttgaggtcaacatcca

SEQ ID NO: 265 - RNA, 19 nt, synthetic construct
  misc_feature 1..19: note = Synthetic: WV-38491
  misc_feature 1..19: note = Synthetic: SSR-0103819
  modified_base 1: mod_base = OTHER; note = 2-O-methylribose adenine
  modified_base 2: mod_base = um
  modified_base 3: mod_base = OTHER; note = 2-fluororibose uracil
  modified_base 4: mod_base = um
  modified_base 5: mod_base = OTHER; note = 2-fluororibose guanine
  modified_base 6: mod_base = OTHER; note = 2-O-methylribose adenine
  modified_base 7: mod_base = OTHER; note = 2-fluororibose guanine
  modified_base 8: mod_base = OTHER; note = 2-fluororibose guanine
  modified_base 9: mod_base = OTHER; note = 2-fluororibose uracil
  modified_base 10: mod_base = cm
  modified_base 11: mod_base = OTHER; note = 2-fluororibose adenine
  modified_base 12: mod_base = OTHER; note = 2-O-methylribose adenine
  modified_base 13: mod_base = OTHER; note = 2-fluororibose cytosine
  modified_base 14: mod_base = OTHER; note = 2-O-methylribose adenine
  modified_base 15: mod_base = OTHER; note = 2-fluororibose uracil
  modified_base 16: mod_base = cm
  modified_base 17: mod_base = OTHER; note = 2-fluororibose cytosine
  modified_base 18: mod_base = um
  modified_base 19: mod_base = OTHER; note = 2-fluororibose adenine
  source 1..19: mol_type = other RNA
atttgaggtcaacatccta

SEQ ID NO: 266 - RNA, 19 nt, synthetic construct
  misc_feature 1..19: note = Synthetic: WV-38492
  misc_feature 1..19: note = Synthetic: SSR-0103860
  modified_base 1: mod_base = cm
  modified_base 2: mod_base = um
  modified_base 3: mod_base = OTHER; note = 2-fluororibose adenine
  modified_base 4: mod_base = gm
  modified_base 5: mod_base = OTHER; note = 2-fluororibose guanine
  modified_base 6: mod_base = OTHER; note = 2-O-methylribose adenine
  modified_base 7: mod_base = OTHER; note = 2-fluororibose cytosine
  modified_base 8: mod_base = OTHER; note = 2-fluororibose adenine
  modified_base 9: mod_base = OTHER; note = 2-fluororibose uracil
  modified_base 10: mod_base = um
  modified_base 11: mod_base = OTHER; note = 2-fluororibose uracil
  modified_base 12: mod_base = um
  modified_base 13: mod_base = OTHER; note = 2-fluororibose uracil
  modified_base 14: mod_base = gm
  modified_base 15: mod_base = OTHER; note = 2-fluororibose guanine
  modified_base 16: mod_base = OTHER; note = 2-O-methylribose adenine
  modified_base 17: mod_base = OTHER; note = 2-fluororibose uracil
  modified_base 18: mod_base = cm
  modified_base 19: mod_base = OTHER; note = 2-fluororibose adenine
  source 1..19: mol_type = other RNA
ctaggacatttttggatca

SEQ ID NO: 267 - RNA, 19 nt, synthetic construct
  misc_feature 1..19: note = Synthetic: WV-38493
  misc_feature 1..19: note = Synthetic: SSR-0103806
  modified_base 1: mod_base = OTHER; note = 2-O-methylribose adenine
  modified_base 2: mod_base = gm
  modified_base 3: mod_base = OTHER; note = 2-fluororibose guanine
  modified_base 4: mod_base = OTHER; note = 2-O-methylribose adenine
  modified_base 5: mod_base = OTHER; note = 2-fluororibose cytosine
  modified_base 6: mod_base = OTHER; note = 2-O-methylribose adenine
  modified_base 7: mod_base = OTHER; note = 2-fluororibose uracil
  modified_base 8: mod_base = OTHER; note = 2-fluororibose uracil
  modified_base 9: mod_base = OTHER; note = 2-fluororibose uracil
  modified_base 10: mod_base = um
  modified_base 11: mod_base = OTHER; note = 2-fluororibose uracil
  modified_base 12: mod_base = gm
  modified_base 13: mod_base = OTHER; note = 2-fluororibose guanine
  modified_base 14: mod_base = OTHER; note = 2-O-methylribose adenine
  modified_base 15: mod_base = OTHER; note = 2-fluororibose uracil
  modified_base 16: mod_base = cm
  modified_base 17: mod_base = OTHER; note = 2-fluororibose adenine
  modified_base 18: mod_base = cm
  modified_base 19: mod_base = OTHER; note = 2-fluororibose adenine
  source 1..19: mol_type = other RNA
aggacatttttggatcaca

SEQ ID NO: 268 - RNA, 19 nt, synthetic construct
  misc_feature 1..19: note = Synthetic: WV-38494
  misc_feature 1..19: note = Synthetic: SSR-0103919
  modified_base 1: mod_base = gm
  modified_base 2: mod_base = gm
  modified_base 3: mod_base = OTHER; note = 2-fluororibose adenine
  modified_base 4: mod_base = cm
  modified_base 5: mod_base = OTHER; note = 2-fluororibose adenine
  modified_base 6: mod_base = um
  modified_base 7: mod_base = OTHER; note = 2-fluororibose uracil
  modified_base 8: mod_base = OTHER; note = 2-fluororibose uracil
  modified_base 9: mod_base = OTHER; note = 2-fluororibose uracil
  modified_base 10: mod_base = um
  modified_base 11: mod_base = OTHER; note = 2-fluororibose guanine
  modified_base 12: mod_base = gm
  modified_base 13: mod_base = OTHER; note = 2-fluororibose adenine
  modified_base 14: mod_base = um
  modified_base 15: mod_base = OTHER; note = 2-fluororibose cytosine
  modified_base 16: mod_base = OTHER; note = 2-O-methylribose adenine
  modified_base 17: mod_base = OTHER; note = 2-fluororibose cytosine
  modified_base 18: mod_base = OTHER; note = 2-O-methylribose adenine
  modified_base 19: mod_base = OTHER; note = 2-fluororibose adenine
  source 1..19: mol_type = other RNA
ggacatttttggatcacaa

SEQ ID NO: 269 - RNA, 19 nt, synthetic construct
  misc_feature 1..19: note = Synthetic: WV-38495
  misc_feature 1..19: note = Synthetic: SSR-0103892
  modified_base 1: mod_base = gm
  modified_base 2: mod_base = OTHER; note = 2-O-methylribose adenine
  modified_base 3: mod_base = OTHER; note = 2-fluororibose cytosine
  modified_base 4: mod_base = OTHER; note = 2-O-methylribose adenine
  modified_base 5: mod_base = OTHER; note = 2-fluororibose uracil
  modified_base 6: mod_base = um
  modified_base 7: mod_base = OTHER; note = 2-fluororibose uracil
  modified_base 8: mod_base = OTHER; note = 2-fluororibose uracil
  modified_base 9: mod_base = OTHER; note = 2-fluororibose uracil
  modified_base 10: mod_base = gm
  modified_base 11: mod_base = OTHER; note = 2-fluororibose guanine
  modified_base 12: mod_base = OTHER; note = 2-O-methylribose adenine
  modified_base 13: mod_base = OTHER; note = 2-fluororibose uracil
  modified_base 14: mod_base = cm
  modified_base 15: mod_base = OTHER; note = 2-fluororibose adenine
  modified_base 16: mod_base = cm
  modified_base 17: mod_base = OTHER; note = 2-fluororibose adenine
  modified_base 18: mod_base = OTHER; note = 2-O-methylribose adenine
  modified_base 19: mod_base = OTHER; note = 2-fluororibose adenine
  source 1..19: mol_type = other RNA
gacatttttggatcacaaa

SEQ ID NO: 270 - RNA, 19 nt, synthetic construct
  misc_feature 1..19: note = Synthetic: WV-38496
  misc_feature 1..19: note = Synthetic: SSR-0103790
  modified_base 1: mod_base = OTHER; note = 2-O-methylribose adenine
  modified_base 2: mod_base = cm
  modified_base 3: mod_base = OTHER; note = 2-fluororibose adenine
  modified_base 4: mod_base = um
  modified_base 5: mod_base = OTHER; note = 2-fluororibose uracil
  modified_base 6: mod_base = um
  modified_base 7: mod_base = OTHER; note = 2-fluororibose uracil
  modified_base 8: mod_base = OTHER; note = 2-fluororibose uracil
  modified_base 9: mod_base = OTHER; note = 2-fluororibose guanine
  modified_base 10: mod_base = gm
  modified_base 11: mod_base = OTHER; note = 2-fluororibose adenine
  modified_base 12: mod_base = um
  modified_base 13: mod_base = OTHER; note = 2-fluororibose cytosine
  modified_base 14: mod_base = OTHER; note = 2-O-methylribose adenine
  modified_base 15: mod_base = OTHER; note = 2-fluororibose cytosine
  modified_base 16: mod_base = OTHER; note = 2-O-methylribose adenine
  modified_base 17: mod_base = OTHER; note = 2-fluororibose adenine
  modified_base 18: mod_base = OTHER; note = 2-O-methylribose adenine
  modified_base 19: mod_base = OTHER; note = 2-fluororibose adenine
  source 1..19: mol_type = other RNA
acatttttggatcacaaaa

SEQ ID NO: 271 - RNA, 19 nt, synthetic construct
  misc_feature 1..19: note = Synthetic: WV-38497
  misc_feature 1..19: note = Synthetic: SSR-0103923
  modified_base 1: mod_base = gm
  modified_base 2: mod_base = gm
  modified_base 3: mod_base = OTHER; note = 2-fluororibose adenine
  modified_base 4: mod_base = um
  modified_base 5: mod_base = OTHER; note = 2-fluororibose cytosine
  modified_base 6: mod_base = OTHER; note = 2-O-methylribose adenine
  modified_base 7: mod_base = OTHER; note = 2-fluororibose cytosine
  modified_base 8: mod_base = OTHER; note = 2-fluororibose adenine
  modified_base 9: mod_base = OTHER; note = 2-fluororibose adenine
  modified_base 10: mod_base = OTHER; note = 2-O-methylribose adenine
  modified_base 11: mod_base = OTHER; note = 2-fluororibose adenine
  modified_base 12: mod_base = gm
  modified_base 13: mod_base = OTHER; note = 2-fluororibose cytosine
  modified_base 14: mod_base = OTHER; note = 2-O-methylribose adenine
  modified_base 15: mod_base = OTHER; note = 2-fluororibose cytosine
  modified_base 16: mod_base = um
  modified_base 17: mod_base = OTHER; note = 2-fluororibose uracil
  modified_base 18: mod_base = cm
  modified_base 19: mod_base = OTHER; note = 2-fluororibose adenine
  source 1..19: mol_type = other RNA
ggatcacaaaagcacttca

SEQ ID NO: 272 - RNA, 19 nt, synthetic construct
  misc_feature 1..19: note = Synthetic: WV-38498
  misc_feature 1..19: note = Synthetic: SSR-0103898
  modified_base 1: mod_base = gm
  modified_base 2: mod_base = OTHER; note = 2-O-methylribose adenine
  modified_base 3: mod_base = OTHER; note = 2-fluororibose uracil
  modified_base 4: mod_base = cm
  modified_base 5: mod_base = OTHER; note = 2-fluororibose adenine
  modified_base 6: mod_base = cm
  modified_base 7: mod_base = OTHER; note = 2-fluororibose adenine
  modified_base 8: mod_base = OTHER; note = 2-fluororibose adenine
  modified_base 9: mod_base = OTHER; note = 2-fluororibose adenine
  modified_base 10: mod_base = OTHER; note = 2-O-methylribose adenine
  modified_base 11: mod_base = OTHER; note = 2-fluororibose guanine
  modified_base 12: mod_base = cm
  modified_base 13: mod_base = OTHER; note = 2-fluororibose adenine
  modified_base 14: mod_base = cm
  modified_base 15: mod_base = OTHER; note = 2-fluororibose uracil
  modified_base 16: mod_base = um
  modified_base 17: mod_base = OTHER; note = 2-fluororibose cytosine
  modified_base 18: mod_base = um
  modified_base 19: mod_base = OTHER; note = 2-fluororibose adenine
  source 1..19: mol_type = other RNA
gatcacaaaagcacttcta

SEQ ID NO: 273 - RNA, 19 nt, synthetic construct
  misc_feature 1..19: note = Synthetic: WV-38499
  misc_feature 1..19: note = Synthetic: SSR-0103825
  modified_base 1: mod_base = cm
  modified_base 2: mod_base = OTHER; note = 2-O-methylribose adenine
  modified_base 3: mod_base = OTHER; note = 2-fluororibose cytosine
  modified_base 4: mod_base = OTHER; note = 2-O-methylribose adenine
  modified_base 5: mod_base = OTHER; note = 2-fluororibose adenine
  modified_base 6: mod_base = OTHER; note = 2-O-methylribose adenine
  modified_base 7: mod_base = OTHER; note = 2-fluororibose adenine
  modified_base 8: mod_base = OTHER; note = 2-fluororibose guanine
  modified_base 9: mod_base = OTHER; note = 2-fluororibose cytosine
  modified_base 10: mod_base = OTHER; note = 2-O-methylribose adenine
  modified_base 11: mod_base = OTHER; note = 2-fluororibose cytosine
  modified_base 12: mod_base = um
  modified_base 13: mod_base = OTHER; note = 2-fluororibose uracil
  modified_base 14: mod_base = cm
  modified_base 15: mod_base = OTHER; note = 2-fluororibose uracil
  modified_base 16: mod_base = um
  modified_base 17: mod_base = OTHER; note = 2-fluororibose cytosine
  modified_base 18: mod_base = cm
  modified_base 19: mod_base = OTHER; note = 2-fluororibose adenine
  source 1..19: mol_type = other RNA
cacaaaagcacttcttcca

SEQ ID NO: 274 - RNA, 19 nt, synthetic construct
  misc_feature 1..19: note = Synthetic: WV-38500
  misc_feature 1..19: note = Synthetic: SSR-0103785
  modified_base 1: mod_base = OTHER; note = 2-O-methylribose adenine
  modified_base 2: mod_base = cm
  modified_base 3: mod_base = OTHER; note = 2-fluororibose adenine
  modified_base 4: mod_base = OTHER; note = 2-O-methylribose adenine
  modified_base 5: mod_base = OTHER; note = 2-fluororibose adenine
  modified_base 6: mod_base = OTHER; note = 2-O-methylribose adenine
  modified_base 7: mod_base = OTHER; note = 2-fluororibose guanine
  modified_base 8: mod_base = OTHER; note = 2-fluororibose cytosine
  modified_base 9: mod_base = OTHER; note = 2-fluororibose adenine
  modified_base 10: mod_base = cm
  modified_base 11: mod_base = OTHER; note = 2-fluororibose uracil
  modified_base 12: mod_base = um
  modified_base 13: mod_base = OTHER; note = 2-fluororibose cytosine
  modified_base 14: mod_base = um
  modified_base 15: mod_base = OTHER; note = 2-fluororibose uracil
  modified_base 16: mod_base = cm
  modified_base 17: mod_base = OTHER; note = 2-fluororibose cytosine
  modified_base 18: mod_base = OTHER; note = 2-O-methylribose adenine
  modified_base 19: mod_base = OTHER; note = 2-fluororibose adenine
  source 1..19: mol_type = other RNA
acaaaagcacttcttccaa

SEQ ID NO: 275 - RNA, 19 nt, synthetic construct
  misc_feature 1..19: note = Synthetic: WV-38501
  misc_feature 1..19: note = Synthetic: SSR-0103768
  modified_base 1: mod_base = OTHER; note = 2-O-methylribose adenine
  modified_base 2: mod_base = OTHER; note = 2-O-methylribose adenine
  modified_base 3: mod_base = OTHER; note = 2-fluororibose adenine
  modified_base 4: mod_base = gm
  modified_base 5: mod_base = OTHER; note = 2-fluororibose cytosine
  modified_base 6: mod_base = OTHER; note = 2-O-methylribose adenine
  modified_base 7: mod_base = OTHER; note = 2-fluororibose cytosine
  modified_base 8: mod_base = OTHER; note = 2-fluororibose uracil
  modified_base 9: mod_base = OTHER; note = 2-fluororibose uracil
  modified_base 10: mod_base = cm
  modified_base 11: mod_base = OTHER; note = 2-fluororibose uracil
  modified_base 12: mod_base = um
  modified_base 13: mod_base = OTHER; note = 2-fluororibose cytosine
  modified_base 14: mod_base = cm
  modified_base 15: mod_base = OTHER; note = 2-fluororibose adenine
  modified_base 16: mod_base = um
  modified_base 17: mod_base = OTHER; note = 2-fluororibose cytosine
  modified_base 18: mod_base = gm
  modified_base 19: mod_base = OTHER; note = 2-fluororibose adenine
  source 1..19: mol_type = other RNA
aaagcacttcttccatcga

SEQ ID NO: 276 - RNA, 19 nt, synthetic construct
  misc_feature 1..19: note = Synthetic: WV-38502
  misc_feature 1..19: note = Synthetic: SSR-0103895
  modified_base 1: mod_base = gm
  modified_base 2: mod_base = OTHER; note = 2-O-methylribose adenine
  modified_base 3: mod_base = OTHER; note = 2-fluororibose guanine
  modified_base 4: mod_base = OTHER; note = 2-O-methylribose adenine
  modified_base 5: mod_base = OTHER; note = 2-fluororibose guanine
  modified_base 6: mod_base = OTHER; note = 2-O-methylribose adenine
  modified_base 7: mod_base = OTHER; note = 2-fluororibose adenine
  modified_base 8: mod_base = OTHER; note = 2-fluororibose adenine
  modified_base 9: mod_base = OTHER; note = 2-fluororibose uracil
  modified_base 10: mod_base = cm
  modified_base 11: mod_base = OTHER; note = 2-fluororibose adenine
  modified_base 12: mod_base = um
  modified_base 13: mod_base = OTHER; note = 2-fluororibose guanine
  modified_base 14: mod_base = gm
  modified_base 15: mod_base = OTHER; note = 2-fluororibose cytosine
  modified_base 16: mod_base = cm
  modified_base 17: mod_base = OTHER; note = 2-fluororibose adenine
  modified_base 18: mod_base = cm
  modified_base 19: mod_base = OTHER; note = 2-fluororibose adenine
  source 1..19: mol_type = other RNA
gagagaaatcatggccaca

SEQ ID NO: 277 - RNA, 19 nt, synthetic construct
  misc_feature 1..19: note = Synthetic: WV-38503
  misc_feature 1..19: note = Synthetic: SSR-0103947
  modified_base 1: mod_base = um
  modified_base 2: mod_base = cm
  modified_base 3: mod_base = OTHER; note = 2-fluororibose cytosine
  modified_base 4: mod_base = cm
  modified_base 5: mod_base = OTHER; note = 2-fluororibose adenine
  modified_base 6: mod_base = um
  modified_base 7: mod_base = OTHER; note = 2-fluororibose adenine
  modified_base 8: mod_base = OTHER; note = 2-fluororibose uracil
  modified_base 9: mod_base = OTHER; note = 2-fluororibose uracil
  modified_base 10: mod_base = gm
  modified_base 11: mod_base = OTHER; note = 2-fluororibose uracil
  modified_base 12: mod_base = um
  modified_base 13: mod_base = OTHER; note = 2-fluororibose cytosine
  modified_base 14: mod_base = cm
  modified_base 15: mod_base = OTHER; note = 2-fluororibose adenine
  modified_base 16: mod_base = gm
  modified_base 17: mod_base = OTHER; note = 2-fluororibose cytosine
  modified_base 18: mod_base = OTHER; note = 2-O-methylribose adenine
  modified_base 19: mod_base = OTHER; note = 2-fluororibose adenine
  source 1..19: mol_type = other RNA
tcccatattgttccagcaa

SEQ ID NO: 278 - RNA, 19 nt, synthetic construct
  misc_feature 1..19: note = Synthetic: WV-38504
  misc_feature 1..19: note = Synthetic: SSR-0103851
  modified_base 1: mod_base = cm
  modified_base 2: mod_base = cm
  modified_base 3: mod_base = OTHER; note = 2-fluororibose cytosine
  modified_base 4: mod_base = OTHER; note = 2-O-methylribose adenine
  modified_base 5: mod_base = OTHER; note = 2-fluororibose uracil
  modified_base 6: mod_base = OTHER; note = 2-O-methylribose adenine
  modified_base 7: mod_base = OTHER; note = 2-fluororibose uracil
  modified_base 8: mod_base = OTHER; note = 2-fluororibose uracil
  modified_base 9: mod_base = OTHER; note = 2-fluororibose guanine
  modified_base 10: mod_base = um
  modified_base 11: mod_base = OTHER; note = 2-fluororibose uracil
  modified_base 12: mod_base = cm
  modified_base 13: mod_base = OTHER; note = 2-fluororibose cytosine
  modified_base 14: mod_base = OTHER; note = 2-O-methylribose adenine
  modified_base 15: mod_base = OTHER; note = 2-fluororibose guanine
  modified_base 16: mod_base = cm
  modified_base 17: mod_base = OTHER; note = 2-fluororibose adenine
  modified_base 18: mod_base = OTHER; note = 2-O-methylribose adenine
  modified_base 19: mod_base = OTHER; note = 2-fluororibose adenine
  source 1..19: mol_type = other RNA
cccatattgttccagcaaa

SEQ ID NO: 279 - RNA, 19 nt, synthetic construct
  misc_feature 1..19: note = Synthetic: WV-38505
  misc_feature 1..19: note = Synthetic: SSR-0103846
  modified_base 1: mod_base = cm
  modified_base 2: mod_base = cm
  modified_base 3: mod_base = OTHER; note = 2-fluororibose adenine
  modified_base 4: mod_base = um
  modified_base 5: mod_base = OTHER; note = 2-fluororibose adenine
  modified_base 6: mod_base = um
  modified_base 7: mod_base = OTHER; note = 2-fluororibose uracil
  modified_base 8: mod_base = OTHER; note = 2-fluororibose guanine
  modified_base 9: mod_base = OTHER; note = 2-fluororibose uracil
  modified_base 10: mod_base = um
  modified_base 11: mod_base = OTHER; note = 2-fluororibose cytosine
  modified_base 12: mod_base = cm
  modified_base 13: mod_base = OTHER; note = 2-fluororibose adenine
  modified_base 14: mod_base = gm
  modified_base 15: mod_base = OTHER; note = 2-fluororibose cytosine
  modified_base 16: mod_base = OTHER; note = 2-O-methylribose adenine
  modified_base 17: mod_base = OTHER; note = 2-fluororibose adenine
  modified_base 18: mod_base = OTHER; note = 2-O-methylribose adenine
  modified_base 19: mod_base = OTHER; note = 2-fluororibose adenine
  source 1..19: mol_type = other RNA
ccatattgttccagcaaaa

SEQ ID NO: 280 - RNA, 19 nt, synthetic construct
  misc_feature 1..19: note = Synthetic: WV-38506
  misc_feature 1..19: note = Synthetic: SSR-0103834
  modified_base 1: mod_base = cm
  modified_base 2: mod_base = OTHER; note = 2-O-methylribose adenine
  modified_base 3: mod_base = OTHER; note = 2-fluororibose uracil
  modified_base 4: mod_base = OTHER; note = 2-O-methylribose adenine
  modified_base 5: mod_base = OTHER; note = 2-fluororibose uracil
  modified_base 6: mod_base = um
  modified_base 7: mod_base = OTHER; note = 2-fluororibose guanine
  modified_base 8: mod_base = OTHER; note = 2-fluororibose uracil
  modified_base 9: mod_base = OTHER; note = 2-fluororibose uracil
  modified_base 10: mod_base = cm
  modified_base 11: mod_base = OTHER; note = 2-fluororibose cytosine
  modified_base 12: mod_base = OTHER; note = 2-O-methylribose adenine
  modified_base 13: mod_base = OTHER; note = 2-fluororibose guanine
  modified_base 14: mod_base = cm
  modified_base 15: mod_base = OTHER; note = 2-fluororibose adenine
  modified_base 16: mod_base = OTHER; note = 2-O-methylribose adenine
  modified_base 17: mod_base = OTHER; note = 2-fluororibose adenine
  modified_base 18: mod_base = um
  modified_base 19: mod_base = OTHER; note = 2-fluororibose adenine
  source 1..19: mol_type = other RNA
catattgttccagcaaata

SEQ ID NO: 281 - RNA, 19 nt, synthetic construct
  misc_feature 1..19: note = Synthetic: WV-38507
  misc_feature 1..19: note = Synthetic: SSR-0103815
  modified_base 1: mod_base = OTHER; note = 2-O-methylribose adenine
  modified_base 2: mod_base = um
  modified_base 3: mod_base = OTHER; note = 2-fluororibose adenine
  modified_base 4: mod_base = um
  modified_base 5: mod_base = OTHER; note = 2-fluororibose uracil
  modified_base 6: mod_base = gm
  modified_base 7: mod_base = OTHER; note = 2-fluororibose uracil
  modified_base 8: mod_base = OTHER; note = 2-fluororibose uracil
  modified_base 9: mod_base = OTHER; note = 2-fluororibose cytosine
  modified_base 10: mod_base = cm
  modified_base 11: mod_base = OTHER; note = 2-fluororibose adenine
  modified_base 12: mod_base = gm
  modified_base 13: mod_base = OTHER; note = 2-fluororibose cytosine
  modified_base 14: mod_base = OTHER; note = 2-O-methylribose adenine
  modified_base 15: mod_base = OTHER; note = 2-fluororibose adenine
  modified_base 16: mod_base = OTHER; note = 2-O-methylribose adenine
  modified_base 17: mod_base = OTHER; note = 2-fluororibose uracil
  modified_base 18: mod_base = um
  modified_base 19: mod_base = OTHER; note = 2-fluororibose adenine
  source 1..19: mol_type = other RNA
atattgttccagcaaatta

SEQ ID NO: 282 - RNA, 19 nt, synthetic construct
  misc_feature 1..19: note = Synthetic: WV-38508
  misc_feature 1..19: note = Synthetic: SSR-0103906
  modified_base 1: mod_base = gm
  modified_base 2: mod_base = cm
  modified_base 3: mod_base = OTHER; note = 2-fluororibose cytosine
  modified_base 4: mod_base = gm
  modified_base 5: mod_base = OTHER; note = 2-fluororibose cytosine
  modified_base 6: mod_base = um
  modified_base 7: mod_base = OTHER; note = 2-fluororibose guanine
  modified_base 8: mod_base = OTHER; note = 2-fluororibose uracil
  modified_base 9: mod_base = OTHER; note = 2-fluororibose uracil
  modified_base 10: mod_base = gm
  modified_base 11: mod_base = OTHER; note = 2-fluororibose guanine
  modified_base 12: mod_base = cm
  modified_base 13: mod_base = OTHER; note = 2-fluororibose uracil
  modified_base 14: mod_base = um
  modified_base 15: mod_base = OTHER; note = 2-fluororibose uracil
  modified_base 16: mod_base = cm
  modified_base 17: mod_base = OTHER; note = 2-fluororibose adenine
  modified_base 18: mod_base = cm
  modified_base 19: mod_base = OTHER; note = 2-fluororibose adenine
  source 1..19: mol_type = other RNA
gccgctgttggctttcaca

SEQ ID NO: 283 - RNA, 19 nt, synthetic construct
  misc_feature 1..19: note = Synthetic: WV-38509
  misc_feature 1..19: note = Synthetic: SSR-0103856
  modified_base 1: mod_base = cm
  modified_base 2: mod_base = gm
  modified_base 3: mod_base = OTHER; note = 2-fluororibose cytosine
  modified_base 4: mod_base = um
  modified_base 5: mod_base = OTHER; note = 2-fluororibose guanine
  modified_base 6: mod_base = um
  modified_base 7: mod_base = OTHER; note = 2-fluororibose uracil
  modified_base 8: mod_base = OTHER; note = 2-fluororibose guanine
  modified_base 9: mod_base = OTHER; note = 2-fluororibose guanine
  modified_base 10: mod_base = cm
  modified_base 11: mod_base = OTHER; note = 2-fluororibose uracil
  modified_base 12: mod_base = um
  modified_base 13: mod_base = OTHER; note = 2-fluororibose uracil
  modified_base 14: mod_base = cm
  modified_base 15: mod_base = OTHER; note = 2-fluororibose adenine
  modified_base 16: mod_base = cm
  modified_base 17: mod_base = OTHER; note = 2-fluororibose adenine
  modified_base 18: mod_base = gm
  modified_base 19: mod_base = OTHER; note = 2-fluororibose adenine
  source 1..19: mol_type = other RNA
cgctgttggctttcacaga

SEQ ID NO: 284 - RNA, 19 nt, synthetic construct
  misc_feature 1..19: note = Synthetic: WV-38510
  misc_feature 1..19: note = Synthetic: SSR-0103926
  modified_base 1: mod_base = gm
  modified_base 2: mod_base = gm
  modified_base 3: mod_base = OTHER; note = 2-fluororibose cytosine
  modified_base 4: mod_base = um
  modified_base 5: mod_base = OTHER; note = 2-fluororibose uracil
  modified_base 6: mod_base = um
  modified_base 7: mod_base = OTHER; note = 2-fluororibose cytosine
  modified_base 8: mod_base = OTHER; note = 2-fluororibose adenine
  modified_base 9: mod_base = OTHER; note = 2-fluororibose cytosine
  modified_base 10: mod_base = OTHER; note = 2-O-methylribose adenine
  modified_base 11: mod_base = OTHER; note = 2-fluororibose guanine
  modified_base 12: mod_base = OTHER; note = 2-O-methylribose adenine
  modified_base 13: mod_base = OTHER; note = 2-fluororibose guanine
  modified_base 14: mod_base = gm
  modified_base 15: mod_base = OTHER; note = 2-fluororibose uracil
  modified_base 16: mod_base = cm
  modified_base 17: mod_base = OTHER; note = 2-fluororibose uracil
  modified_base 18: mod_base = gm
  modified_base 19: mod_base = OTHER; note = 2-fluororibose adenine
  source 1..19: mol_type = other RNA
ggctttcacagaggtctga

SEQ ID NO: 285 - RNA, 19 nt, synthetic construct
  misc_feature 1..19: note = Synthetic: WV-38511
  misc_feature 1..19: note = Synthetic: SSR-0103871
  modified_base 1: mod_base = cm
  modified_base 2: mod_base = um
  modified_base 3: mod_base = OTHER; note = 2-fluororibose uracil
  modified_base 4: mod_base = um
  modified_base 5: mod_base = OTHER; note = 2-fluororibose cytosine
  modified_base 6: mod_base = OTHER; note = 2-O-methylribose adenine
  modified_base 7: mod_base = OTHER; note = 2-fluororibose cytosine
  modified_base 8: mod_base = OTHER; note = 2-fluororibose adenine
  modified_base 9: mod_base = OTHER; note = 2-fluororibose guanine
  modified_base 10: mod_base = OTHER; note = 2-O-methylribose adenine
  modified_base 11: mod_base = OTHER; note = 2-fluororibose guanine
  modified_base 12: mod_base = gm
  modified_base 13: mod_base = OTHER; note = 2-fluororibose uracil
  modified_base 14: mod_base = cm
  modified_base 15: mod_base = OTHER; note = 2-fluororibose uracil
  modified_base 16: mod_base = gm
  modified_base 17: mod_base = OTHER; note = 2-fluororibose adenine
  modified_base 18: mod_base = cm
  modified_base 19: mod_base = OTHER; note = 2-fluororibose adenine
  source 1..19: mol_type = other RNA
ctttcacagaggtctgaca

SEQ ID NO: 286 - RNA, 19 nt, synthetic construct
  misc_feature 1..19: note = Synthetic: WV-38512
  misc_feature 1..19: note = Synthetic: SSR-0103788
  modified_base 1: mod_base = OTHER; note = 2-O-methylribose adenine
  modified_base 2: mod_base = cm
  modified_base 3: mod_base = OTHER; note = 2-fluororibose adenine
  modified_base 4: mod_base = gm
  modified_base 5: mod_base = OTHER; note = 2-fluororibose adenine
  modified_base 6: mod_base = gm
  modified_base 7: mod_base = OTHER; note = 2-fluororibose guanine
  modified_base 8: mod_base = OTHER; note = 2-fluororibose uracil
  modified_base 9: mod_base = OTHER; note = 2-fluororibose cytosine
  modified_base 10: mod_base = um
  modified_base 11: mod_base = OTHER; note = 2-fluororibose guanine
  modified_base 12: mod_base = OTHER; note = 2-O-methylribose adenine
  modified_base 13: mod_base = OTHER; note = 2-fluororibose cytosine
  modified_base 14: mod_base = OTHER; note = 2-O-methylribose adenine
  modified_base 15: mod_base = OTHER; note = 2-fluororibose uracil
  modified_base 16: mod_base = cm
  modified_base 17: mod_base = OTHER; note = 2-fluororibose adenine
  modified_base 18: mod_base = gm
  modified_base 19: mod_base = OTHER; note = 2-fluororibose adenine
  source 1..19: mol_type = other RNA
acagaggtctgacatcaga

SEQ ID NO: 287 - RNA, 19 nt, synthetic construct
  misc_feature 1..19: note = Synthetic: WV-38513
  misc_feature 1..19: note = Synthetic: SSR-0103832
  modified_base 1: mod_base = cm
  modified_base 2: mod_base = OTHER; note = 2-O-methylribose adenine
  modified_base 3: mod_base = OTHER; note = 2-fluororibose guanine
  modified_base 4: mod_base = OTHER; note = 2-O-methylribose adenine
  modified_base 5: mod_base = OTHER; note = 2-fluororibose guanine
  modified_base 6: mod_base = gm
  modified_base 7: mod_base = OTHER; note = 2-fluororibose uracil
  modified_base 8: mod_base = OTHER; note = 2-fluororibose cytosine
  modified_base 9: mod_base = OTHER; note = 2-fluororibose uracil
  modified_base 10: mod_base = gm
  modified_base 11: mod_base = OTHER; note = 2-fluororibose adenine
  modified_base 12: mod_base = cm
  modified_base 13: mod_base = OTHER; note = 2-fluororibose adenine
  modified_base 14: mod_base = um
  modified_base 15: mod_base = OTHER; note = 2-fluororibose cytosine
  modified_base 16: mod_base = OTHER; note = 2-O-methylribose adenine
  modified_base 17: mod_base = OTHER; note = 2-fluororibose guanine
  modified_base 18: mod_base = OTHER; note = 2-O-methylribose adenine
  modified_base 19: mod_base = OTHER; note = 2-fluororibose adenine
  source 1..19: mol_type = other RNA
cagaggtctgacatcagaa

SEQ ID NO: 288 - RNA, 19 nt, synthetic construct
  misc_feature 1..19: note = Synthetic: WV-38514
  misc_feature 1..19: note = Synthetic: SSR-0103939
  modified_base 1: mod_base = gm
  modified_base 2: mod_base = um
  modified_base 3: mod_base = OTHER; note = 2-fluororibose cytosine
  modified_base 4: mod_base = um
  modified_base 5: mod_base = OTHER; note = 2-fluororibose guanine
  modified_base 6: mod_base = OTHER; note = 2-O-methylribose adenine
  modified_base 7: mod_base = OTHER; note = 2-fluororibose cytosine
  modified_base 8: mod_base = OTHER; note = 2-fluororibose adenine
  modified_base 9: mod_base = OTHER; note = 2-fluororibose uracil
  modified_base 10: mod_base = cm
  modified_base 11: mod_base = OTHER; note = 2-fluororibose adenine
  modified_base 12: mod_base = gm
  modified_base 13: mod_base = OTHER; note = 2-fluororibose adenine
  modified_base 14: mod_base = OTHER; note = 2-O-methylribose adenine
  modified_base 15: mod_base = OTHER; note = 2-fluororibose cytosine
  modified_base 16: mod_base = um
  modified_base 17: mod_base = OTHER; note = 2-fluororibose uracil
  modified_base 18: mod_base = cm
  modified_base 19: mod_base = OTHER; note = 2-fluororibose adenine
  source 1..19: mol_type = other RNA
gtctgacatcagaacttca

SEQ ID NO: 289 - RNA, 19 nt, synthetic construct
  misc_feature 1..19: note = Synthetic: WV-38515
  misc_feature 1..19: note = Synthetic: SSR-0103907
  modified_base 1: mod_base = gm
  modified_base 2: mod_base = cm
  modified_base 3: mod_base = OTHER; note = 2-fluororibose cytosine
  modified_base 4: mod_base = um
  modified_base 5: mod_base = OTHER; note = 2-fluororibose uracil
  modified_base 6: mod_base = gm
  modified_base 7: mod_base = OTHER; note = 2-fluororibose guanine
  modified_base 8: mod_base = OTHER; note = 2-fluororibose guanine
  modified_base 9: mod_base = OTHER; note = 2-fluororibose adenine
  modified_base 10: mod_base = OTHER; note = 2-O-methylribose adenine
  modified_base 11: mod_base = OTHER; note = 2-fluororibose adenine
  modified_base 12: mod_base = OTHER; note = 2-O-methylribose adenine
  modified_base 13: mod_base = OTHER; note = 2-fluororibose adenine
  modified_base 14: mod_base = cm
  modified_base 15: mod_base = OTHER; note = 2-fluororibose uracil
  modified_base 16: mod_base = gm
  modified_base 17: mod_base = OTHER; note = 2-fluororibose guanine
  modified_base 18: mod_base = um
  modified_base 19: mod_base = OTHER; note = 2-fluororibose adenine
  source 1..19: mol_type = other RNA
gccttgggaaaaactggta

SEQ ID NO: 290 - RNA, 19 nt, synthetic construct
  misc_feature 1..19: note = Synthetic: WV-38516
  misc_feature 1..19: note = Synthetic: SSR-0103927
  modified_base 1: mod_base = gm
  modified_base 2: mod_base = gm
  modified_base 3: mod_base = OTHER; note = 2-fluororibose guanine
  modified_base 4: mod_base = OTHER; note = 2-O-methylribose adenine
  modified_base 5: mod_base = OTHER; note = 2-fluororibose adenine
  modified_base 6: mod_base = OTHER; note = 2-O-methylribose adenine
  modified_base 7: mod_base = OTHER; note = 2-fluororibose adenine
  modified_base 8: mod_base = OTHER; note = 2-fluororibose adenine
  modified_base 9: mod_base = OTHER; note = 2-fluororibose cytosine
  modified_base 10: mod_base = um
  modified_base 11: mod_base = OTHER; note = 2-fluororibose guanine
  modified_base 12: mod_base = gm
  modified_base 13: mod_base = OTHER; note = 2-fluororibose uracil
  modified_base 14: mod_base = OTHER; note = 2-O-methylribose adenine
  modified_base 15: mod_base = OTHER; note = 2-fluororibose uracil
  modified_base 16: mod_base = cm
  modified_base 17: mod_base = OTHER; note = 2-fluororibose adenine
  modified_base 18: mod_base = OTHER; note = 2-O-methylribose adenine
  modified_base 19: mod_base = OTHER; note = 2-fluororibose adenine
  source 1..19: mol_type = other RNA
gggaaaaactggtatcaaa

SEQ ID NO: 291 - RNA, 19 nt, synthetic construct
  misc_feature 1..19: note = Synthetic: WV-38517
  misc_feature 1..19: note = Synthetic: SSR-0103912
  modified_base 1: mod_base = gm
  modified_base 2: mod_base = gm
  modified_base 3: mod_base = OTHER; note = 2-fluororibose adenine
  modified_base 4: mod_base = OTHER; note = 2-O-methylribose adenine
  modified_base 5: mod_base = OTHER; note = 2-fluororibose adenine
  modified_base 6: mod_base = OTHER; note = 2-O-methylribose adenine
  modified_base 7: mod_base = OTHER; note = 2-fluororibose adenine
  modified_base 8: mod_base = OTHER; note = 2-fluororibose cytosine
  modified_base 9: mod_base = OTHER; note = 2-fluororibose uracil
  modified_base 10: mod_base = gm
  modified_base 11: mod_base = OTHER; note = 2-fluororibose guanine
  modified_base 12: mod_base = um
  modified_base 13: mod_base = OTHER; note = 2-fluororibose adenine
  modified_base 14: mod_base = um
  modified_base 15: mod_base = OTHER; note = 2-fluororibose cytosine
  modified_base 16: mod_base = OTHER; note = 2-O-methylribose adenine
  modified_base 17: mod_base = OTHER; note = 2-fluororibose adenine
  modified_base 18: mod_base = OTHER; note = 2-O-methylribose adenine
  modified_base 19: mod_base = OTHER; note = 2-fluororibose adenine
  source 1..19: mol_type = other RNA
ggaaaaactggtatcaaaa

SEQ ID NO: 292 - RNA, 19 nt, synthetic construct
  misc_feature 1..19: note = Synthetic: WV-38518
  misc_feature 1..19: note = Synthetic: SSR-0103773
  modified_base 1: mod_base = OTHER; note = 2-O-methylribose adenine
  modified_base 2: mod_base = OTHER; note = 2-O-methylribose adenine
  modified_base 3: mod_base = OTHER; note = 2-fluororibose cytosine
  modified_base 4: mod_base = um
  modified_base 5: mod_base = OTHER; note = 2-fluororibose guanine
  modified_base 6: mod_base = gm
  modified_base 7: mod_base = OTHER; note = 2-fluororibose uracil
  modified_base 8: mod_base = OTHER; note = 2-fluororibose adenine
  modified_base 9: mod_base = OTHER; note = 2-fluororibose uracil
  modified_base 10: mod_base = cm
  modified_base 11: mod_base = OTHER; note = 2-fluororibose adenine
  modified_base 12: mod_base = OTHER; note = 2-O-methylribose adenine
  modified_base 13: mod_base = OTHER; note = 2-fluororibose adenine
  modified_base 14: mod_base = OTHER; note = 2-O-methylribose adenine
  modified_base 15: mod_base = OTHER; note = 2-fluororibose cytosine
  modified_base 16: mod_base = cm
  modified_base 17: mod_base = OTHER; note = 2-fluororibose uracil
  modified_base 18: mod_base = cm
  modified_base 19: mod_base = OTHER; note = 2-fluororibose adenine
  source 1..19: mol_type = other RNA
aactggtatcaaaacctca

SEQ ID NO: 293 - RNA, 19 nt, synthetic construct
  misc_feature 1..19: note = Synthetic: WV-38519
  misc_feature 1..19: note = Synthetic: SSR-0103938
  modified_base 1: mod_base = gm
  modified_base 2: mod_base = um
  modified_base 3: mod_base = OTHER; note = 2-fluororibose adenine
  modified_base 4: mod_base = um
  modified_base 5: mod_base = OTHER; note = 2-fluororibose cytosine
  modified_base 6: mod_base = OTHER; note = 2-O-methylribose adenine
  modified_base 7: mod_base = OTHER; note = 2-fluororibose adenine
  modified_base 8: mod_base = OTHER; note = 2-fluororibose adenine
  modified_base 9: mod_base = OTHER; note = 2-fluororibose adenine
  modified_base 10: mod_base = cm
  modified_base 11: mod_base = OTHER; note = 2-fluororibose cytosine
  modified_base 12: mod_base = um
  modified_base 13: mod_base = OTHER; note = 2-fluororibose cytosine
  modified_base 14: mod_base = OTHER; note = 2-O-methylribose adenine
  modified_base 15: mod_base = OTHER; note = 2-fluororibose uracil
  modified_base 16: mod_base = gm
  modified_base 17: mod_base = OTHER; note = 2-fluororibose uracil
  modified_base 18: mod_base = cm
  modified_base 19: mod_base = OTHER; note = 2-fluororibose adenine
  source 1..19: mol_type = other RNA
gtatcaaaacctcatgtca

SEQ ID NO: 294 - RNA, 19 nt, synthetic construct
  misc_feature 1..19: note = Synthetic: WV-38520
  misc_feature 1..19: note = Synthetic: SSR-0103953
  modified_base 1: mod_base = um
  modified_base 2: mod_base = gm
  modified_base 3: mod_base = OTHER; note = 2-fluororibose adenine
  modified_base 4: mod_base = OTHER; note = 2-O-methylribose adenine
  modified_base 5: mod_base = OTHER; note = 2-fluororibose uracil
  modified_base 6: mod_base = OTHER; note = 2-O-methylribose adenine
  modified_base 7: mod_base = OTHER; note = 2-fluororibose cytosine
  modified_base 8: mod_base = OTHER; note = 2-fluororibose uracil
  modified_base 9: mod_base = OTHER; note = 2-fluororibose guanine
  modified_base 10: mod_base = gm
  modified_base 11: mod_base = OTHER; note = 2-fluororibose guanine
  modified_base 12: mod_base = um
  modified_base 13: mod_base = OTHER; note = 2-fluororibose uracil
  modified_base 14: mod_base = cm
  modified_base 15: mod_base = OTHER; note = 2-fluororibose adenine
  modified_base 16: mod_base = cm
  modified_base 17: mod_base = OTHER; note = 2-fluororibose cytosine
  modified_base 18: mod_base = OTHER; note = 2-O-methylribose adenine
  modified_base 19: mod_base = OTHER; note = 2-fluororibose adenine
  source 1..19: mol_type = other RNA
tgaatactgggttcaccaa

SEQ ID NO: 295 - RNA, 19 nt, synthetic construct
  misc_feature 1..19: note = Synthetic: WV-38521
  misc_feature 1..19: note = Synthetic: SSR-0103883
  modified_base 1: mod_base = gm
  modified_base 2: mod_base = OTHER; note = 2-O-methylribose adenine
  modified_base 3: mod_base = OTHER; note = 2-fluororibose adenine
  modified_base 4: mod_base = um
  modified_base 5: mod_base = OTHER; note = 2-fluororibose adenine
  modified_base 6: mod_base = cm
  modified_base 7: mod_base = OTHER; note = 2-fluororibose uracil
  modified_base 8: mod_base = OTHER; note = 2-fluororibose guanine
  modified_base 9: mod_base = OTHER; note = 2-fluororibose guanine
  modified_base 10: mod_base = gm
  modified_base 11: mod_base = OTHER; note = 2-fluororibose uracil
  modified_base 12: mod_base = um
  modified_base 13: mod_base = OTHER; note = 2-fluororibose cytosine
  modified_base 14: mod_base = OTHER; note = 2-O-methylribose adenine
  modified_base 15: mod_base = OTHER; note = 2-fluororibose cytosine
  modified_base 16: mod_base = cm
  modified_base 17: mod_base = OTHER; note = 2-fluororibose adenine
  modified_base 18: mod_base = OTHER; note = 2-O-methylribose adenine
  modified_base 19: mod_base = OTHER; note = 2-fluororibose adenine
  source 1..19: mol_type = other RNA
gaatactgggttcaccaaa

SEQ ID NO: 296 - RNA, 19 nt, synthetic construct
  misc_feature 1..19: note = Synthetic: WV-38522
  misc_feature 1..19: note = Synthetic: SSR-0103781
  modified_base 1: mod_base = OTHER; note = 2-O-methylribose adenine
  modified_base 2: mod_base = OTHER; note = 2-O-methylribose adenine
  modified_base 3: mod_base = OTHER; note = 2-fluororibose uracil
  modified_base 4: mod_base = OTHER; note = 2-O-methylribose adenine
  modified_base 5: mod_base = OTHER; note = 2-fluororibose cytosine
  modified_base 6: mod_base = um
  modified_base 7: mod_base = OTHER; note = 2-fluororibose guanine
  modified_base 8: mod_base = OTHER; note = 2-fluororibose guanine
  modified_base 9: mod_base = OTHER; note = 2-fluororibose guanine
  modified_base 10: mod_base = um
  modified_base 11: mod_base = OTHER; note = 2-fluororibose uracil
  modified_base 12: mod_base = cm
  modified_base 13: mod_base = OTHER; note = 2-fluororibose adenine
  modified_base 14: mod_base = cm
  modified_base 15: mod_base = OTHER; note = 2-fluororibose cytosine
  modified_base 16: mod_base = OTHER; note = 2-O-methylribose adenine
  modified_base 17: mod_base = OTHER; note = 2-fluororibose adenine
  modified_base 18: mod_base = OTHER; note = 2-O-methylribose adenine
  modified_base 19: mod_base = OTHER; note = 2-fluororibose adenine
  source 1..19: mol_type = other RNA
aatactgggttcaccaaaa

SEQ ID NO: 297 - RNA, 19 nt, synthetic construct
  misc_feature 1..19: note = Synthetic: WV-38523
  misc_feature 1..19: note = Synthetic: SSR-0103814
  modified_base 1: mod_base = OTHER; note = 2-O-methylribose adenine
  modified_base 2: mod_base = um
  modified_base 3: mod_base = OTHER; note = 2-fluororibose adenine
  modified_base 4: mod_base = cm
  modified_base 5: mod_base = OTHER; note = 2-fluororibose uracil
  modified_base 6: mod_base = gm
  modified_base 7: mod_base = OTHER; note = 2-fluororibose guanine
  modified_base 8: mod_base = OTHER; note = 2-fluororibose guanine
  modified_base 9: mod_base = OTHER; note = 2-fluororibose uracil
  modified_base 10: mod_base = um
  modified_base 11: mod_base = OTHER; note = 2-fluororibose cytosine
  modified_base 12: mod_base = OTHER; note = 2-O-methylribose adenine
  modified_base 13: mod_base = OTHER; note = 2-fluororibose cytosine
  modified_base 14: mod_base = cm
  modified_base 15: mod_base = OTHER; note = 2-fluororibose adenine
  modified_base 16: mod_base = OTHER; note = 2-O-methylribose adenine
  modified_base 17: mod_base = OTHER; note = 2-fluororibose adenine
  modified_base 18: mod_base = OTHER; note = 2-O-methylribose adenine
  modified_base 19: mod_base = OTHER; note = 2-fluororibose adenine
  source 1..19: mol_type = other RNA
atactgggttcaccaaaaa

SEQ ID NO: 298 - RNA, 19 nt, synthetic construct
  misc_feature 1..19: note = Synthetic: WV-38524
  misc_feature 1..19: note = Synthetic: SSR-0103930
  modified_base 1: mod_base = gm
  modified_base 2: mod_base = gm
  modified_base 3: mod_base = OTHER; note = 2-fluororibose guanine
  modified_base 4: mod_base = um
  modified_base 5: mod_base = OTHER; note = 2-fluororibose uracil
  modified_base 6: mod_base = cm
  modified_base 7: mod_base = OTHER; note = 2-fluororibose adenine
  modified_base 8: mod_base = OTHER; note = 2-fluororibose cytosine
  modified_base 9: mod_base = OTHER; note = 2-fluororibose cytosine
  modified_base 10: mod_base = OTHER; note = 2-O-methylribose adenine
  modified_base 11: mod_base = OTHER; note = 2-fluororibose adenine
  modified_base 12: mod_base = OTHER; note = 2-O-methylribose adenine
  modified_base 13: mod_base = OTHER; note = 2-fluororibose adenine
  modified_base 14: mod_base = OTHER; note = 2-O-methylribose adenine
  modified_base 15: mod_base = OTHER; note = 2-fluororibose uracil
  modified_base 16: mod_base = cm
  modified_base 17: mod_base = OTHER; note = 2-fluororibose cytosine
  modified_base 18: mod_base = OTHER; note = 2-O-methylribose adenine
  modified_base 19: mod_base = OTHER; note = 2-fluororibose adenine
  source 1..19: mol_type = other RNA
gggttcaccaaaaatccaa

SEQ ID NO: 299 - RNA, 19 nt, synthetic construct
  misc_feature 1..19: note = Synthetic: WV-38525
  misc_feature 1..19: note = Synthetic: SSR-0103820
  modified_base 1: mod_base = cm
  modified_base 2: mod_base = OTHER; note = 2-O-methylribose adenine
  modified_base 3: mod_base = OTHER; note = 2-fluororibose adenine
  modified_base 4: mod_base = OTHER; note = 2-O-methylribose adenine
  modified_base 5: mod_base = OTHER; note = 2-fluororibose adenine
  modified_base 6: mod_base = OTHER; note = 2-O-methylribose adenine
  modified_base 7: mod_base = OTHER; note = 2-fluororibose uracil
  modified_base 8: mod_base = OTHER; note = 2-fluororibose cytosine
  modified_base 9: mod_base = OTHER; note = 2-fluororibose cytosine
  modified_base 10: mod_base = OTHER; note = 2-O-methylribose adenine
  modified_base 11: mod_base = OTHER; note = 2-fluororibose adenine
  modified_base 12: mod_base = gm
  modified_base 13: mod_base = OTHER; note = 2-fluororibose cytosine
  modified_base 14: mod_base = OTHER; note = 2-O-methylribose adenine
  modified_base 15: mod_base = OTHER; note = 2-fluororibose cytosine
  modified_base 16: mod_base = OTHER; note = 2-O-methylribose adenine
  modified_base 17: mod_base = OTHER; note = 2-fluororibose adenine
  modified_base 18: mod_base = gm
  modified_base 19: mod_base = OTHER; note = 2-fluororibose adenine
  source 1..19: mol_type = other RNA
caaaaatccaagcacaaga

SEQ ID NO: 300 - RNA, 19 nt, synthetic construct
  misc_feature 1..19: note = Synthetic: WV-38526
  misc_feature 1..19: note = Synthetic: SSR-0103771
  modified_base 1: mod_base = OTHER; note = 2-O-methylribose adenine
  modified_base 2: mod_base = OTHER; note = 2-O-methylribose adenine
  modified_base 3: mod_base = OTHER; note = 2-fluororibose adenine
  modified_base 4: mod_base = um
  modified_base 5: mod_base = OTHER; note = 2-fluororibose cytosine
  modified_base 6: mod_base = cm
  modified_base 7: mod_base = OTHER; note = 2-fluororibose adenine
  modified_base 8: mod_base = OTHER; note = 2-fluororibose adenine
  modified_base 9: mod_base = OTHER; note = 2-fluororibose guanine
  modified_base 10: mod_base = cm
  modified_base 11: mod_base = OTHER; note = 2-fluororibose adenine
  modified_base 12: mod_base = cm
  modified_base 13: mod_base = OTHER; note = 2-fluororibose adenine
  modified_base 14: mod_base = OTHER; note = 2-O-methylribose adenine
  modified_base 15: mod_base = OTHER; note = 2-fluororibose guanine
  modified_base 16: mod_base = OTHER; note = 2-O-methylribose adenine
  modified_base 17: mod_base = OTHER; note = 2-fluororibose uracil
  modified_base 18: mod_base = um
  modified_base 19: mod_base = OTHER; note = 2-fluororibose adenine
  source 1..19: mol_type = other RNA
aaatccaagcacaagatta

SEQ ID NO: 301 - RNA, 19 nt, synthetic construct
  misc_feature 1..19: note = Synthetic: WV-38527
  misc_feature 1..19: note = Synthetic: SSR-0103784
  modified_base 1: mod_base = OTHER; note = 2-O-methylribose adenine
  modified_base 2: mod_base = OTHER; note = 2-O-methylribose adenine
  modified_base 3: mod_base = OTHER; note = 2-fluororibose uracil
  modified_base 4: mod_base = cm
  modified_base 5: mod_base = OTHER; note = 2-fluororibose cytosine
  modified_base 6: mod_base = OTHER; note = 2-O-methylribose adenine
  modified_base 7: mod_base = OTHER; note = 2-fluororibose adenine
  modified_base 8: mod_base = OTHER; note = 2-fluororibose guanine
  modified_base 9: mod_base = OTHER; note = 2-fluororibose cytosine
  modified_base 10: mod_base = OTHER; note = 2-O-methylribose adenine
  modified_base 11: mod_base = OTHER; note = 2-fluororibose cytosine
  modified_base 12: mod_base = OTHER; note = 2-O-methylribose adenine
  modified_base 13: mod_base = OTHER; note = 2-fluororibose adenine
  modified_base 14: mod_base = gm
  modified_base 15: mod_base = OTHER; note = 2-fluororibose adenine
  modified_base 16: mod_base = um
  modified_base 17: mod_base = OTHER; note = 2-fluororibose uracil
  modified_base 18: mod_base = OTHER; note = 2-O-methylribose adenine
  modified_base 19: mod_base = OTHER; note = 2-fluororibose adenine
  source 1..19: mol_type = other RNA
aatccaagcacaagattaa

SEQ ID NO: 302 - RNA, 19 nt, synthetic construct
  misc_feature 1..19: note = Synthetic: WV-38528
  misc_feature 1..19: note = Synthetic: SSR-0103826
  modified_base 1: mod_base = cm
  modified_base 2: mod_base = OTHER; note = 2-O-methylribose adenine
  modified_base 3: mod_base = OTHER; note = 2-fluororibose cytosine
  modified_base 4: mod_base = OTHER; note = 2-O-methylribose adenine
  modified_base 5: mod_base = OTHER; note = 2-fluororibose adenine
  modified_base 6: mod_base = gm
  modified_base 7: mod_base = OTHER; note = 2-fluororibose adenine
  modified_base 8: mod_base = OTHER; note = 2-fluororibose uracil
  modified_base 9: mod_base = OTHER; note = 2-fluororibose uracil
  modified_base 10: mod_base = OTHER; note = 2-O-methylribose adenine
  modified_base 11: mod_base = OTHER; note = 2-fluororibose uracil
  modified_base 12: mod_base = gm
  modified_base 13: mod_base = OTHER; note = 2-fluororibose guanine
  modified_base 14: mod_base = cm
  modified_base 15: mod_base = OTHER; note = 2-fluororibose cytosine
  modified_base 16: mod_base = um
  modified_base 17: mod_base = OTHER; note = 2-fluororibose guanine
  modified_base 18: mod_base = um
  modified_base 19: mod_base = OTHER; note = 2-fluororibose adenine
  source 1..19: mol_type = other RNA
cacaagattatggcctgta

SEQ ID NO: 303 - RNA, 19 nt, synthetic construct
  misc_feature 1..19: note = Synthetic: WV-38529
  misc_feature 1..19: note = Synthetic: SSR-0103786
  modified_base 1: mod_base = OTHER; note = 2-O-methylribose adenine
  modified_base 2: mod_base = cm
  modified_base 3: mod_base = OTHER; note = 2-fluororibose adenine
  modified_base 4: mod_base = OTHER; note = 2-O-methylribose adenine
  modified_base 5: mod_base = OTHER; note = 2-fluororibose guanine
  modified_base 6: mod_base = OTHER; note = 2-O-methylribose adenine
  modified_base 7: mod_base = OTHER; note = 2-fluororibose uracil
  modified_base 8: mod_base = OTHER; note = 2-fluororibose uracil
  modified_base 9: mod_base = OTHER; note = 2-fluororibose adenine
  modified_base 10: mod_base = um
  modified_base 11: mod_base = OTHER; note = 2-fluororibose guanine
  modified_base 12: mod_base = gm
  modified_base 13: mod_base = OTHER; note = 2-fluororibose cytosine
  modified_base 14: mod_base = cm
  modified_base 15: mod_base = OTHER; note = 2-fluororibose uracil
  modified_base 16: mod_base = gm
  modified_base 17: mod_base = OTHER; note = 2-fluororibose uracil
  modified_base 18: mod_base = OTHER; note = 2-O-methylribose adenine
  modified_base 19: mod_base = OTHER; note = 2-fluororibose adenine
  source 1..19: mol_type = other RNA
acaagattatggcctgtaa

SEQ ID NO: 304 - RNA, 19 nt, synthetic construct
  misc_feature 1..19: note = Synthetic: WV-38530
  misc_feature 1..19: note = Synthetic: SSR-0103823
  modified_base 1: mod_base = cm
  modified_base 2: mod_base = OTHER; note = 2-O-methylribose adenine
  modified_base 3: mod_base = OTHER; note = 2-fluororibose adenine
  modified_base 4: mod_base = gm
  modified_base 5: mod_base = OTHER; note = 2-fluororibose adenine
  modified_base 6: mod_base = um
  modified_base 7: mod_base = OTHER; note = 2-fluororibose uracil
  modified_base 8: mod_base = OTHER; note = 2-fluororibose adenine
  modified_base 9: mod_base = OTHER; note = 2-fluororibose uracil
  modified_base 10: mod_base = gm
  modified_base 11: mod_base = OTHER; note = 2-fluororibose guanine
  modified_base 12: mod_base = cm
  modified_base 13: mod_base = OTHER; note = 2-fluororibose cytosine
  modified_base 14: mod_base = um
  modified_base 15: mod_base = OTHER; note = 2-fluororibose guanine
  modified_base 16: mod_base = um
  modified_base 17: mod_base = OTHER; note = 2-fluororibose adenine
  modified_base 18: mod_base = um
  modified_base 19: mod_base = OTHER; note = 2-fluororibose adenine
  source 1..19: mol_type = other RNA
caagattatggcctgtata

SEQ ID NO: 305 - RNA, 19 nt, synthetic construct
  misc_feature 1..19: note = Synthetic: WV-38531
  misc_feature 1..19: note = Synthetic: SSR-0103901
  modified_base 1: mod_base = gm
  modified_base 2: mod_base = OTHER; note = 2-O-methylribose adenine
  modified_base 3: mod_base = OTHER; note = 2-fluororibose uracil
  modified_base 4: mod_base = um
  modified_base 5: mod_base = OTHER; note = 2-fluororibose adenine
  modified_base 6: mod_base = um
  modified_base 7: mod_base = OTHER; note = 2-fluororibose guanine
  modified_base 8: mod_base = OTHER; note = 2-fluororibose guanine
  modified_base 9: mod_base = OTHER; note = 2-fluororibose cytosine
  modified_base 10: mod_base = cm
  modified_base 11: mod_base = OTHER; note = 2-fluororibose uracil
  modified_base 12: mod_base = gm
  modified_base 13: mod_base = OTHER; note = 2-fluororibose uracil
  modified_base 14: mod_base = OTHER; note = 2-O-methylribose adenine
  modified_base 15: mod_base = OTHER; note = 2-fluororibose uracil
  modified_base 16: mod_base = um
  modified_base 17: mod_base = OTHER; note = 2-fluororibose guanine
  modified_base 18: mod_base = gm
  modified_base 19: mod_base = OTHER; note = 2-fluororibose adenine
  source 1..19: mol_type = other RNA
gattatggcctgtattgga

SEQ ID NO: 306 - RNA, 19 nt, synthetic construct
  misc_feature 1..19: note = Synthetic: WV-38532
  misc_feature 1..19: note = Synthetic: SSR-0103924
  modified_base 1: mod_base = gm
  modified_base 2: mod_base = gm
  modified_base 3: mod_base = OTHER; note = 2-fluororibose cytosine
  modified_base 4: mod_base = cm
  modified_base 5: mod_base = OTHER; note = 2-fluororibose uracil
  modified_base 6: mod_base = gm
  modified_base 7: mod_base = OTHER; note = 2-fluororibose uracil
  modified_base 8: mod_base = OTHER; note = 2-fluororibose adenine
  modified_base 9: mod_base = OTHER; note = 2-fluororibose uracil
  modified_base 10: mod_base = um
  modified_base 11: mod_base = OTHER; note = 2-fluororibose guanine
  modified_base 12: mod_base = gm
  modified_base 13: mod_base = OTHER; note = 2-fluororibose adenine
  modified_base 14: mod_base = gm
  modified_base 15: mod_base = OTHER; note = 2-fluororibose adenine
  modified_base 16: mod_base = cm
  modified_base 17: mod_base = OTHER; note = 2-fluororibose adenine
  modified_base 18: mod_base = gm
  modified_base 19: mod_base = OTHER; note = 2-fluororibose adenine
  source 1..19: mol_type = other RNA
ggcctgtattggagacaga

SEQ ID NO: 307 - RNA, 19 nt, synthetic construct
  misc_feature 1..19: note = Synthetic: WV-38533
  misc_feature 1..19: note = Synthetic: SSR-0103864
  modified_base 1: mod_base = cm
  modified_base 2: mod_base = um
  modified_base 3: mod_base = OTHER; note = 2-fluororibose guanine
  modified_base 4: mod_base = um
  modified_base 5: mod_base = OTHER; note = 2-fluororibose adenine
  modified_base 6: mod_base = um
  modified_base 7: mod_base = OTHER; note = 2-fluororibose uracil
  modified_base 8: mod_base = OTHER; note = 2-fluororibose guanine
  modified_base 9: mod_base = OTHER; note = 2-fluororibose guanine
  modified_base 10: mod_base = OTHER; note = 2-O-methylribose adenine
  modified_base 11: mod_base = OTHER; note = 2-fluororibose guanine
  modified_base 12: mod_base = OTHER; note = 2-O-methylribose adenine
  modified_base 13: mod_base = OTHER; note = 2-fluororibose cytosine
  modified_base 14: mod_base = OTHER; note = 2-O-methylribose adenine
  modified_base 15: mod_base = OTHER; note = 2-fluororibose guanine
  modified_base 16: mod_base = OTHER; note = 2-O-methylribose adenine
  modified_base 17: mod_base = OTHER; note = 2-fluororibose uracil
  modified_base 18: mod_base = gm
  modified_base 19: mod_base = OTHER; note = 2-fluororibose adenine
  source 1..19: mol_type = other RNA
ctgtattggagacagatga

SEQ ID NO: 308 - RNA, 19 nt, synthetic construct
  misc_feature 1..19: note = Synthetic: WV-38534
  misc_feature 1..19: note = Synthetic: SSR-0103956
  modified_base 1: mod_base = um
  modified_base 2: mod_base = gm
  modified_base 3: mod_base = OTHER; note = 2-fluororibose uracil
  modified_base 4: mod_base = OTHER; note = 2-O-methylribose adenine
  modified_base 5: mod_base = OTHER; note = 2-fluororibose uracil
  modified_base 6: mod_base = um
  modified_base 7: mod_base = OTHER; note = 2-fluororibose guanine
  modified_base 8: mod_base = OTHER; note = 2-fluororibose guanine
  modified_base 9: mod_base = OTHER; note = 2-fluororibose adenine
  modified_base 10: mod_base = gm
  modified_base 11: mod_base = OTHER; note = 2-fluororibose adenine
  modified_base 12: mod_base = cm
  modified_base 13: mod_base = OTHER; note = 2-fluororibose adenine
  modified_base 14: mod_base = gm
  modified_base 15: mod_base = OTHER; note = 2-fluororibose adenine
  modified_base 16: mod_base = um
  modified_base 17: mod_base = OTHER; note = 2-fluororibose guanine
  modified_base 18: mod_base = OTHER; note = 2-O-methylribose adenine
  modified_base 19: mod_base = OTHER; note = 2-fluororibose adenine
  source 1..19: mol_type = other RNA
tgtattggagacagatgaa

SEQ ID NO: 309 - RNA, 19 nt, synthetic construct
  misc_feature 1..19: note = Synthetic: WV-38535
  misc_feature 1..19: note = Synthetic: SSR-0103921
  modified_base 1: mod_base = gm
  modified_base 2: mod_base = gm
  modified_base 3: mod_base = OTHER; note = 2-fluororibose adenine
  modified_base 4: mod_base = gm
  modified_base 5: mod_base = OTHER; note = 2-fluororibose adenine
  modified_base 6: mod_base = cm
  modified_base 7: mod_base = OTHER; note = 2-fluororibose adenine
  modified_base 8: mod_base = OTHER; note = 2-fluororibose guanine
  modified_base 9: mod_base = OTHER; note = 2-fluororibose adenine
  modified_base 10: mod_base = um
  modified_base 11: mod_base = OTHER; note = 2-fluororibose guanine
  modified_base 12: mod_base = OTHER; note = 2-O-methylribose adenine
  modified_base 13: mod_base = OTHER; note = 2-fluororibose adenine
  modified_base 14: mod_base = gm
  modified_base 15: mod_base = OTHER; note = 2-fluororibose uracil
  modified_base 16: mod_base = cm
  modified_base 17: mod_base = OTHER; note = 2-fluororibose guanine
  modified_base 18: mod_base = um
  modified_base 19: mod_base = OTHER; note = 2-fluororibose adenine
  source 1..19: mol_type = other RNA
ggagacagatgaagtcgta

SEQ ID NO: 310 - RNA, 19 nt, synthetic construct
  misc_feature 1..19: note = Synthetic: WV-38536
  misc_feature 1..19: note = Synthetic: SSR-0103894
  modified_base 1: mod_base = gm
  modified_base 2: mod_base = OTHER; note = 2-O-methylribose adenine
  modified_base 3: mod_base = OTHER; note = 2-fluororibose guanine
  modified_base 4: mod_base = OTHER; note = 2-O-methylribose adenine
  modified_base 5: mod_base = OTHER; note = 2-fluororibose cytosine
  modified_base 6: mod_base = OTHER; note = 2-O-methylribose adenine
  modified_base 7: mod_base = OTHER; note = 2-fluororibose guanine
  modified_base 8: mod_base = OTHER; note = 2-fluororibose adenine
  modified_base 9: mod_base = OTHER; note = 2-fluororibose uracil
  modified_base 10: mod_base = gm
  modified_base 11: mod_base = OTHER; note = 2-fluororibose adenine
  modified_base 12: mod_base = OTHER; note = 2-O-methylribose adenine
  modified_base 13: mod_base = OTHER; note = 2-fluororibose guanine
  modified_base 14: mod_base = um
  modified_base 15: mod_base = OTHER; note = 2-fluororibose cytosine
  modified_base 16: mod_base = gm
  modified_base 17: mod_base = OTHER; note = 2-fluororibose uracil
  modified_base 18: mod_base = OTHER; note = 2-O-methylribose adenine
  modified_base 19: mod_base = OTHER; note = 2-fluororibose adenine
  source 1..19: mol_type = other RNA
gagacagatgaagtcgtaa

SEQ ID NO: 311 - RNA, 19 nt, synthetic construct
  misc_feature 1..19: note = Synthetic: WV-38537
  misc_feature 1..19: note = Synthetic: SSR-0103890
  modified_base 1: mod_base = gm
  modified_base 2: mod_base = OTHER; note = 2-O-methylribose adenine
  modified_base 3: mod_base = OTHER; note = 2-fluororibose cytosine
  modified_base 4: mod_base = OTHER; note = 2-O-methylribose adenine
  modified_base 5: mod_base = OTHER; note = 2-fluororibose guanine
  modified_base 6: mod_base = OTHER; note = 2-O-methylribose adenine
  modified_base 7: mod_base = OTHER; note = 2-fluororibose uracil
  modified_base 8: mod_base = OTHER; note = 2-fluororibose guanine
  modified_base 9: mod_base = OTHER; note = 2-fluororibose adenine
  modified_base 10: mod_base = OTHER; note = 2-O-methylribose adenine
  modified_base 11: mod_base = OTHER; note = 2-fluororibose guanine
  modified_base 12: mod_base = um
  modified_base 13: mod_base = OTHER; note = 2-fluororibose cytosine
  modified_base 14: mod_base = gm
  modified_base 15: mod_base = OTHER; note = 2-fluororibose uracil
  modified_base 16: mod_base = OTHER; note = 2-O-methylribose adenine
  modified_base 17: mod_base = OTHER; note = 2-fluororibose adenine
  modified_base 18: mod_base = gm
  modified_base 19: mod_base = OTHER; note = 2-fluororibose adenine
  source 1..19: mol_type = other RNA
gacagatgaagtcgtaaga

SEQ ID NO: 312 - RNA, 19 nt, synthetic construct
  misc_feature 1..19: note = Synthetic: WV-38538
  misc_feature 1..19: note = Synthetic: SSR-0103789
  modified_base 1: mod_base = OTHER; note = 2-O-methylribose adenine
  modified_base 2: mod_base = cm
  modified_base 3: mod_base = OTHER; note = 2-fluororibose adenine
  modified_base 4: mod_base = gm
  modified_base 5: mod_base = OTHER; note = 2-fluororibose adenine
  modified_base 6: mod_base = um
  modified_base 7: mod_base = OTHER; note = 2-fluororibose guanine
  modified_base 8: mod_base = OTHER; note = 2-fluororibose adenine
  modified_base 9: mod_base = OTHER; note = 2-fluororibose adenine
  modified_base 10: mod_base = gm
  modified_base 11: mod_base = OTHER; note = 2-fluororibose uracil
  modified_base 12: mod_base = cm
  modified_base 13: mod_base = OTHER; note = 2-fluororibose guanine
  modified_base 14: mod_base = um
  modified_base 15: mod_base = OTHER; note = 2-fluororibose adenine
  modified_base 16: mod_base = OTHER; note = 2-O-methylribose adenine
  modified_base 17: mod_base = OTHER; note = 2-fluororibose guanine
  modified_base 18: mod_base = OTHER; note = 2-O-methylribose adenine
  modified_base 19: mod_base = OTHER; note = 2-fluororibose adenine
  source 1..19: mol_type = other RNA
acagatgaagtcgtaagaa

SEQ ID NO: 313 - RNA, 19 nt, synthetic construct
  misc_feature 1..19: note = Synthetic: WV-38539
  misc_feature 1..19: note = Synthetic: SSR-0103801
  modified_base 1: mod_base = OTHER; note = 2-O-methylribose adenine
  modified_base 2: mod_base = gm
  modified_base 3: mod_base = OTHER; note = 2-fluororibose adenine
  modified_base 4: mod_base = um
  modified_base 5: mod_base = OTHER; note = 2-fluororibose guanine
  modified_base 6: mod_base = OTHER; note = 2-O-methylribose adenine
  modified_base 7: mod_base = OTHER; note = 2-fluororibose adenine
  modified_base 8: mod_base = OTHER; note = 2-fluororibose guanine
  modified_base 9: mod_base = OTHER; note = 2-fluororibose uracil
  modified_base 10: mod_base = cm
  modified_base 11: mod_base = OTHER; note = 2-fluororibose guanine
  modified_base 12: mod_base = um
  modified_base 13: mod_base = OTHER; note = 2-fluororibose adenine
  modified_base 14: mod_base = OTHER; note = 2-O-methylribose adenine
  modified_base 15: mod_base = OTHER; note = 2-fluororibose guanine
  modified_base 16: mod_base = OTHER; note = 2-O-methylribose adenine
  modified_base 17: mod_base = OTHER; note = 2-fluororibose adenine
  modified_base 18: mod_base = gm
  modified_base 19: mod_base = OTHER; note = 2-fluororibose adenine
  source 1..19: mol_type = other RNA
agatgaagtcgtaagaaga

SEQ ID NO: 314 - RNA, 19 nt, synthetic construct
  misc_feature 1..19: note = Synthetic: WV-38540
  misc_feature 1..19: note = Synthetic: SSR-0103879
  modified_base 1: mod_base = gm
  modified_base 2: mod_base = OTHER; note = 2-O-methylribose adenine
  modified_base 3: mod_base = OTHER; note = 2-fluororibose adenine
  modified_base 4: mod_base = gm
  modified_base 5: mod_base = OTHER; note = 2-fluororibose uracil
  modified_base 6: mod_base = cm
  modified_base 7: mod_base = OTHER; note = 2-fluororibose guanine
  modified_base 8: mod_base = OTHER; note = 2-fluororibose uracil
  modified_base 9: mod_base = OTHER; note = 2-fluororibose adenine
  modified_base 10: mod_base = OTHER; note = 2-O-methylribose adenine
  modified_base 11: mod_base = OTHER; note = 2-fluororibose guanine
  modified_base 12: mod_base = OTHER; note = 2-O-methylribose adenine
  modified_base 13: mod_base = OTHER; note = 2-fluororibose adenine
  modified_base 14: mod_base = gm
  modified_base 15: mod_base = OTHER; note = 2-fluororibose uracil
  modified_base 16: mod_base = cm
  modified_base 17: mod_base = OTHER; note = 2-fluororibose uracil
  modified_base 18: mod_base = gm
  modified_base 19: mod_base = OTHER; note = 2-fluororibose adenine
  source 1..19: mol_type = other RNA
gaagtcgtaagaagtctga

SEQ ID NO: 315 - RNA, 19 nt, synthetic construct
  misc_feature 1..19: note = Synthetic: WV-38541
  misc_feature 1..19: note = Synthetic: SSR-0103812
  modified_base 1: mod_base = OTHER; note = 2-O-methylribose adenine
  modified_base 2: mod_base = gm
  modified_base 3: mod_base = OTHER; note = 2-fluororibose uracil
  modified_base 4: mod_base = cm
  modified_base 5: mod_base = OTHER; note = 2-fluororibose guanine
  modified_base 6: mod_base = um
  modified_base 7: mod_base = OTHER; note = 2-fluororibose adenine
  modified_base 8: mod_base = OTHER; note = 2-fluororibose adenine
  modified_base 9: mod_base = OTHER; note = 2-fluororibose guanine
  modified_base 10: mod_base = OTHER; note = 2-O-methylribose adenine
  modified_base 11: mod_base = OTHER; note = 2-fluororibose adenine
  modified_base 12: mod_base = gm
  modified_base 13: mod_base = OTHER; note = 2-fluororibose uracil
  modified_base 14: mod_base = cm
  modified_base 15: mod_base = OTHER; note = 2-fluororibose uracil
  modified_base 16: mod_base = gm
  modified_base 17: mod_base = OTHER; note = 2-fluororibose adenine
  modified_base 18: mod_base = um
  modified_base 19: mod_base = OTHER; note = 2-fluororibose adenine
  source 1..19: mol_type = other RNA
agtcgtaagaagtctgata

SEQ ID NO: 316 - RNA, 19 nt, synthetic construct
  misc_feature 1..19: note = Synthetic: WV-38542
  misc_feature 1..19: note = Synthetic: SSR-0103857
  modified_base 1: mod_base = cm
  modified_base 2: mod_base = gm
  modified_base 3: mod_base = OTHER; note = 2-fluororibose uracil
  modified_base 4: mod_base = OTHER; note = 2-O-methylribose adenine
  modified_base 5: mod_base = OTHER; note = 2-fluororibose adenine
  modified_base 6: mod_base = gm
  modified_base 7: mod_base = OTHER; note = 2-fluororibose adenine
  modified_base 8: mod_base = OTHER; note = 2-fluororibose adenine
  modified_base 9: mod_base = OTHER; note = 2-fluororibose guanine
  modified_base 10: mod_base = um
  modified_base 11: mod_base = OTHER; note = 2-fluororibose cytosine
  modified_base 12: mod_base = um
  modified_base 13: mod_base = OTHER; note = 2-fluororibose guanine
  modified_base 14: mod_base = OTHER; note = 2-O-methylribose adenine
  modified_base 15: mod_base = OTHER; note = 2-fluororibose uracil
  modified_base 16: mod_base = OTHER; note = 2-O-methylribose adenine
  modified_base 17: mod_base = OTHER; note = 2-fluororibose guanine
  modified_base 18: mod_base = OTHER; note = 2-O-methylribose adenine
  modified_base 19: mod_base = OTHER; note = 2-fluororibose adenine
  source 1..19: mol_type = other RNA
cgtaagaagtctgatagaa

SEQ ID NO: 317 - RNA, 19 nt, synthetic construct
  misc_feature 1..19: note = Synthetic: WV-38543
  misc_feature 1..19: note = Synthetic: SSR-0103774
  modified_base 1: mod_base = OTHER; note = 2-O-methylribose adenine
  modified_base 2: mod_base = OTHER; note = 2-O-methylribose adenine
  modified_base 3: mod_base = OTHER; note = 2-fluororibose guanine
  modified_base 4: mod_base = OTHER; note = 2-O-methylribose adenine
  modified_base 5: mod_base = OTHER; note = 2-fluororibose adenine
  modified_base 6: mod_base = gm
  modified_base 7: mod_base = OTHER; note = 2-fluororibose uracil
  modified_base 8: mod_base = OTHER; note = 2-fluororibose cytosine
  modified_base 9: mod_base = OTHER; note = 2-fluororibose uracil
  modified_base 10: mod_base = gm
  modified_base 11: mod_base = OTHER; note = 2-fluororibose adenine
  modified_base 12: mod_base = um
  modified_base 13: mod_base = OTHER; note = 2-fluororibose adenine
  modified_base 14: mod_base = gm
  modified_base 15: mod_base = OTHER; note = 2-fluororibose adenine
  modified_base 16: mod_base = um
  modified_base 17: mod_base = OTHER; note = 2-fluororibose guanine
  modified_base 18: mod_base = gm
  modified_base 19: mod_base = OTHER; note = 2-fluororibose adenine
  source 1..19: mol_type = other RNA
aagaagtctgatagatgga

SEQ ID NO: 318 - RNA, 19 nt, synthetic construct
  misc_feature 1..19: note = Synthetic: WV-38544
  misc_feature 1..19: note = Synthetic: SSR-0103794
  modified_base 1: mod_base = OTHER; note = 2-O-methylribose adenine
  modified_base 2: mod_base = gm
  modified_base 3: mod_base = OTHER; note = 2-fluororibose adenine
  modified_base 4: mod_base = OTHER; note = 2-O-methylribose adenine
  modified_base 5: mod_base = OTHER; note = 2-fluororibose guanine
  modified_base 6: mod_base = um
  modified_base 7: mod_base = OTHER; note = 2-fluororibose cytosine
  modified_base 8: mod_base = OTHER; note = 2-fluororibose uracil
  modified_base 9: mod_base = OTHER; note = 2-fluororibose guanine
  modified_base 10: mod_base = OTHER; note = 2-O-methylribose adenine
  modified_base 11: mod_base = OTHER; note = 2-fluororibose uracil
  modified_base 12: mod_base = OTHER; note = 2-O-methylribose adenine
  modified_base 13: mod_base = OTHER; note = 2-fluororibose guanine
  modified_base 14: mod_base = OTHER; note = 2-O-methylribose adenine
  modified_base 15: mod_base = OTHER; note = 2-fluororibose uracil
  modified_base 16: mod_base = gm
  modified_base 17: mod_base = OTHER; note = 2-fluororibose guanine
  modified_base 18: mod_base = OTHER; note = 2-O-methylribose adenine
  modified_base 19: mod_base = OTHER; note = 2-fluororibose adenine
  source 1..19: mol_type = other RNA
agaagtctgatagatggaa

SEQ ID NO: 319 - RNA, 19 nt, synthetic construct
  misc_feature 1..19: note = Synthetic: WV-38545
  misc_feature 1..19: note = Synthetic: SSR-0103880
  modified_base 1: mod_base = gm
  modified_base 2: mod_base = OTHER; note = 2-O-methylribose adenine
  modified_base 3: mod_base = OTHER; note = 2-fluororibose adenine
  modified_base 4: mod_base = gm
  modified_base 5: mod_base = OTHER; note = 2-fluororibose uracil
  modified_base 6: mod_base = cm
  modified_base 7: mod_base = OTHER; note = 2-fluororibose uracil
  modified_base 8: mod_base = OTHER; note = 2-fluororibose guanine
  modified_base 9: mod_base = OTHER; note = 2-fluororibose adenine
  modified_base 10: mod_base = um
  modified_base 11: mod_base = OTHER; note = 2-fluororibose adenine
  modified_base 12: mod_base = gm
  modified_base 13: mod_base = OTHER; note = 2-fluororibose adenine
  modified_base 14: mod_base = um
  modified_base 15: mod_base = OTHER; note = 2-fluororibose guanine
  modified_base 16: mod_base = gm
  modified_base 17: mod_base = OTHER; note = 2-fluororibose adenine
  modified_base 18: mod_base = OTHER; note = 2-O-methylribose adenine
  modified_base 19: mod_base = OTHER; note = 2-fluororibose adenine
  source 1..19: mol_type = other RNA
gaagtctgatagatggaaa

SEQ ID NO: 320 - RNA, 19 nt, synthetic construct
  misc_feature 1..19: note = Synthetic: WV-38546
  misc_feature 1..19: note = Synthetic: SSR-0103777
  modified_base 1: mod_base = OTHER; note = 2-O-methylribose adenine
  modified_base 2: mod_base = OTHER; note = 2-O-methylribose adenine
  modified_base 3: mod_base = OTHER; note = 2-fluororibose guanine
  modified_base 4: mod_base = um
  modified_base 5: mod_base = OTHER; note = 2-fluororibose cytosine
  modified_base 6: mod_base = um
  modified_base 7: mod_base = OTHER; note = 2-fluororibose guanine
  modified_base 8: mod_base = OTHER; note = 2-fluororibose adenine
  modified_base 9: mod_base = OTHER; note = 2-fluororibose uracil
  modified_base 10: mod_base = OTHER; note = 2-O-methylribose adenine
  modified_base 11: mod_base = OTHER; note = 2-fluororibose guanine
  modified_base 12: mod_base = OTHER; note = 2-O-methylribose adenine
  modified_base 13: mod_base = OTHER; note = 2-fluororibose uracil
  modified_base 14: mod_base = gm
  modified_base 15: mod_base = OTHER; note = 2-fluororibose guanine
  modified_base 16: mod_base = OTHER; note = 2-O-methylribose adenine
  modified_base 17: mod_base = OTHER; note = 2-fluororibose adenine
  modified_base 18: mod_base = um
  modified_base 19: mod_base = OTHER; note = 2-fluororibose adenine
  source 1..19: mol_type = other RNA
aagtctgatagatggaata

SEQ ID NO: 321 - RNA, 19 nt, synthetic construct
  misc_feature 1..19: note = Synthetic: WV-38547
  misc_feature 1..19: note = Synthetic: SSR-0103949
  modified_base 1: mod_base = um
  modified_base 2: mod_base = cm
  modified_base 3: mod_base = OTHER; note = 2-fluororibose uracil
  modified_base 4: mod_base = gm
  modified_base 5: mod_base = OTHER; note = 2-fluororibose adenine
  modified_base 6: mod_base = um
  modified_base 7: mod_base = OTHER; note = 2-fluororibose adenine
  modified_base 8: mod_base = OTHER; note = 2-fluororibose guanine
  modified_base 9: mod_base = OTHER; note = 2-fluororibose adenine
  modified_base 10: mod_base = um
  modified_base 11: mod_base = OTHER; note = 2-fluororibose guanine
  modified_base 12: mod_base = gm
  modified_base 13: mod_base = OTHER; note = 2-fluororibose adenine
  modified_base 14: mod_base = OTHER; note = 2-O-methylribose adenine
  modified_base 15: mod_base = OTHER; note = 2-fluororibose uracil
  modified_base 16: mod_base = OTHER; note = 2-O-methylribose adenine
  modified_base 17: mod_base = OTHER; note = 2-fluororibose cytosine
  modified_base 18: mod_base = um
  modified_base 19: mod_base = OTHER; note = 2-fluororibose adenine
  source 1..19: mol_type = other RNA
tctgatagatggaatacta

SEQ ID NO: 322 - RNA, 19 nt, synthetic construct
  misc_feature 1..19: note = Synthetic: WV-38548
  misc_feature 1..19: note = Synthetic: SSR-0103862
  modified_base 1: mod_base = cm
  modified_base 2: mod_base = um
  modified_base 3: mod_base = OTHER; note = 2-fluororibose guanine
  modified_base 4: mod_base = OTHER; note = 2-O-methylribose adenine
  modified_base 5: mod_base = OTHER; note = 2-fluororibose uracil
  modified_base 6: mod_base = OTHER; note = 2-O-methylribose adenine
  modified_base 7: mod_base = OTHER; note = 2-fluororibose guanine
  modified_base 8: mod_base = OTHER; note = 2-fluororibose adenine
  modified_base 9: mod_base = OTHER; note = 2-fluororibose uracil
  modified_base 10: mod_base = gm
  modified_base 11: mod_base = OTHER; note = 2-fluororibose guanine
  modified_base 12: mod_base = OTHER; note = 2-O-methylribose adenine
  modified_base 13: mod_base = OTHER; note = 2-fluororibose adenine
  modified_base 14: mod_base = um
  modified_base 15: mod_base = OTHER; note = 2-fluororibose adenine
  modified_base 16: mod_base = cm
  modified_base 17: mod_base = OTHER; note = 2-fluororibose uracil
  modified_base 18: mod_base = um
  modified_base 19: mod_base = OTHER; note = 2-fluororibose adenine
  source 1..19: mol_type = other RNA
ctgatagatggaatactta

SEQ ID NO: 323 - RNA, 19 nt, synthetic construct
  misc_feature 1..19: note = Synthetic: WV-38549
  misc_feature 1..19: note = Synthetic: SSR-0103944
  modified_base 1: mod_base = um
  modified_base 2: mod_base = OTHER; note = 2-O-methylribose adenine
  modified_base 3: mod_base = OTHER; note = 2-fluororibose guanine
  modified_base 4: mod_base = OTHER; note = 2-O-methylribose adenine
  modified_base 5: mod_base = OTHER; note = 2-fluororibose uracil
  modified_base 6: mod_base = gm
  modified_base 7: mod_base = OTHER; note = 2-fluororibose guanine
  modified_base 8: mod_base = OTHER; note = 2-fluororibose adenine
  modified_base 9: mod_base = OTHER; note = 2-fluororibose adenine
  modified_base 10: mod_base = um
  modified_base 11: mod_base = OTHER; note = 2-fluororibose adenine
  modified_base 12: mod_base = cm
  modified_base 13: mod_base = OTHER; note = 2-fluororibose uracil
  modified_base 14: mod_base = um
  modified_base 15: mod_base = OTHER; note = 2-fluororibose adenine
  modified_base 16: mod_base = cm
  modified_base 17: mod_base = OTHER; note = 2-fluororibose cytosine
  modified_base 18: mod_base = OTHER; note = 2-O-methylribose adenine
  modified_base 19: mod_base = OTHER; note = 2-fluororibose adenine
  source 1..19: mol_type = other RNA
tagatggaatacttaccaa

SEQ ID NO: 324 - RNA, 19 nt, synthetic construct
  misc_feature 1..19: note = Synthetic: WV-38550
  misc_feature 1..19: note = Synthetic: SSR-0103802
  modified_base 1: mod_base = OTHER; note = 2-O-methylribose adenine
  modified_base 2: mod_base = gm
  modified_base 3: mod_base = OTHER; note = 2-fluororibose adenine
  modified_base 4: mod_base = um
  modified_base 5: mod_base = OTHER; note = 2-fluororibose guanine
  modified_base 6: mod_base = gm
  modified_base 7: mod_base = OTHER; note = 2-fluororibose adenine
  modified_base 8: mod_base = OTHER; note = 2-fluororibose adenine
  modified_base 9: mod_base = OTHER; note = 2-fluororibose uracil
  modified_base 10: mod_base = OTHER; note = 2-O-methylribose adenine
  modified_base 11: mod_base = OTHER; note = 2-fluororibose cytosine
  modified_base 12: mod_base = um
  modified_base 13: mod_base = OTHER; note = 2-fluororibose uracil
  modified_base 14: mod_base = OTHER; note = 2-O-methylribose adenine
  modified_base 15: mod_base = OTHER; note = 2-fluororibose cytosine
  modified_base 16: mod_base = cm
  modified_base 17: mod_base = OTHER; note = 2-fluororibose adenine
  modified_base 18: mod_base = OTHER; note = 2-O-methylribose adenine
  modified_base 19: mod_base = OTHER; note = 2-fluororibose adenine
  source 1..19: mol_type = other RNA
agatggaatacttaccaaa

SEQ ID NO: 325 - RNA, 19 nt, synthetic construct
  misc_feature 1..19: note = Synthetic: WV-38551
  misc_feature 1..19: note = Synthetic: SSR-0103899
  modified_base 1: mod_base = gm
  modified_base 2: mod_base = OTHER; note = 2-O-methylribose adenine
  modified_base 3: mod_base = OTHER; note = 2-fluororibose uracil
  modified_base 4: mod_base = gm
  modified_base 5: mod_base = OTHER; note = 2-fluororibose guanine
  modified_base 6: mod_base = OTHER; note = 2-O-methylribose adenine
  modified_base 7: mod_base = OTHER; note = 2-fluororibose adenine
  modified_base 8: mod_base = OTHER; note = 2-fluororibose uracil
  modified_base 9: mod_base = OTHER; note = 2-fluororibose adenine
  modified_base 10: mod_base = cm
  modified_base 11: mod_base = OTHER; note = 2-fluororibose uracil
  modified_base 12: mod_base = um
  modified_base 13: mod_base = OTHER; note = 2-fluororibose adenine
  modified_base 14: mod_base = cm
  modified_base 15: mod_base = OTHER; note = 2-fluororibose cytosine
  modified_base 16: mod_base = OTHER; note = 2-O-methylribose adenine
  modified_base 17: mod_base = OTHER; note = 2-fluororibose adenine
  modified_base 18: mod_base = um
  modified_base 19: mod_base = OTHER; note = 2-fluororibose adenine
  source 1..19: mol_type = other RNA
gatggaatacttaccaata

SEQ ID NO: 326 - RNA, 19 nt, synthetic construct
  misc_feature 1..19: note = Synthetic: WV-38552
  misc_feature 1..19: note = Synthetic: SSR-0103818
  modified_base 1: mod_base = OTHER; note = 2-O-methylribose adenine
  modified_base 2: mod_base = um
  modified_base 3: mod_base = OTHER; note = 2-fluororibose guanine
  modified_base 4: mod_base = gm
  modified_base 5: mod_base = OTHER; note = 2-fluororibose adenine
  modified_base 6: mod_base = OTHER; note = 2-O-methylribose adenine
  modified_base 7: mod_base = OTHER; note = 2-fluororibose uracil
  modified_base 8: mod_base = OTHER; note = 2-fluororibose adenine
  modified_base 9: mod_base = OTHER; note = 2-fluororibose cytosine
  modified_base 10: mod_base = um
  modified_base 11: mod_base = OTHER; note = 2-fluororibose uracil
  modified_base 12: mod_base = OTHER; note = 2-O-methylribose adenine
  modified_base 13: mod_base = OTHER; note = 2-fluororibose cytosine
  modified_base 14: mod_base = cm
  modified_base 15: mod_base = OTHER; note = 2-fluororibose adenine
  modified_base 16: mod_base = OTHER; note = 2-O-methylribose adenine
  modified_base 17: mod_base = OTHER; note = 2-fluororibose uracil
  modified_base 18: mod_base = OTHER; note = 2-O-methylribose adenine
  modified_base 19: mod_base = OTHER; note = 2-fluororibose adenine
  source 1..19: mol_type = other RNA
atggaatacttaccaataa

SEQ ID NO: 327 - RNA, 19 nt, synthetic construct
  misc_feature 1..19: note = Synthetic: WV-38553
  misc_feature 1..19: note = Synthetic: SSR-0103915
  modified_base 1: mod_base = gm
  modified_base 2: mod_base = gm
  modified_base 3: mod_base = OTHER; note = 2-fluororibose adenine
  modified_base 4: mod_base = OTHER; note = 2-O-methylribose adenine
  modified_base 5: mod_base = OTHER; note = 2-fluororibose uracil
  modified_base 6: mod_base = OTHER; note = 2-O-methylribose adenine
  modified_base 7: mod_base = OTHER; note = 2-fluororibose cytosine
  modified_base 8: mod_base = OTHER; note = 2-fluororibose uracil
  modified_base 9: mod_base = OTHER; note = 2-fluororibose uracil
  modified_base 10: mod_base = OTHER; note = 2-O-methylribose adenine
  modified_base 11: mod_base = OTHER; note = 2-fluororibose cytosine
  modified_base 12: mod_base = cm
  modified_base 13: mod_base = OTHER; note = 2-fluororibose adenine
  modified_base 14: mod_base = OTHER; note = 2-O-methylribose adenine
  modified_base 15: mod_base = OTHER; note = 2-fluororibose uracil
  modified_base 16: mod_base = OTHER; note = 2-O-methylribose adenine
  modified_base 17: mod_base = OTHER; note = 2-fluororibose adenine
  modified_base 18: mod_base = gm
  modified_base 19: mod_base = OTHER; note = 2-fluororibose adenine
  source 1..19: mol_type = other RNA
ggaatacttaccaataaga

SEQ ID NO: 328 - RNA, 19 nt, synthetic construct
  misc_feature 1..19: note = Synthetic: WV-38554
  misc_feature 1..19: note = Synthetic: SSR-0103884
  modified_base 1: mod_base = gm
  modified_base 2: mod_base = OTHER; note = 2-O-methylribose adenine
  modified_base 3: mod_base = OTHER; note = 2-fluororibose adenine
  modified_base 4: mod_base = um
  modified_base 5: mod_base = OTHER; note = 2-fluororibose adenine
  modified_base 6: mod_base = cm
  modified_base 7: mod_base = OTHER; note = 2-fluororibose uracil
  modified_base 8: mod_base = OTHER; note = 2-fluororibose uracil
  modified_base 9: mod_base = OTHER; note = 2-fluororibose adenine
  modified_base 10: mod_base = cm
  modified_base 11: mod_base = OTHER; note = 2-fluororibose cytosine
  modified_base 12: mod_base = OTHER; note = 2-O-methylribose adenine
  modified_base 13: mod_base = OTHER; note = 2-fluororibose adenine
  modified_base 14: mod_base = um
  modified_base 15: mod_base = OTHER; note = 2-fluororibose adenine
  modified_base 16: mod_base = OTHER; note = 2-O-methylribose adenine
  modified_base 17: mod_base = OTHER; note = 2-fluororibose guanine
  modified_base 18: mod_base = OTHER; note = 2-O-methylribose adenine
  modified_base 19: mod_base = OTHER; note = 2-fluororibose adenine
  source 1..19: mol_type = other RNA
gaatacttaccaataagaa

SEQ ID NO: 329 - RNA, 19 nt, synthetic construct
  misc_feature 1..19: note = Synthetic: WV-38555
  misc_feature 1..19: note = Synthetic: SSR-0103782
  modified_base 1: mod_base = OTHER; note = 2-O-methylribose adenine
  modified_base 2: mod_base = OTHER; note = 2-O-methylribose adenine
  modified_base 3: mod_base = OTHER; note = 2-fluororibose uracil
  modified_base 4: mod_base = OTHER; note = 2-O-methylribose adenine
  modified_base 5: mod_base = OTHER; note = 2-fluororibose cytosine
  modified_base 6: mod_base = um
  modified_base 7: mod_base = OTHER; note = 2-fluororibose uracil
  modified_base 8: mod_base = OTHER; note = 2-fluororibose adenine
  modified_base 9: mod_base = OTHER; note = 2-fluororibose cytosine
  modified_base 10: mod_base = cm
  modified_base 11: mod_base = OTHER; note = 2-fluororibose adenine
  modified_base 12: mod_base = OTHER; note = 2-O-methylribose adenine
  modified_base 13: mod_base = OTHER; note = 2-fluororibose uracil
  modified_base 14: mod_base = OTHER; note = 2-O-methylribose adenine
  modified_base 15: mod_base = OTHER; note = 2-fluororibose adenine
  modified_base 16: mod_base = gm
  modified_base 17: mod_base = OTHER; note = 2-fluororibose adenine
  modified_base 18: mod_base = OTHER; note = 2-O-methylribose adenine
  modified_base 19: mod_base = OTHER; note = 2-fluororibose adenine
  source 1..19: mol_type = other RNA
aatacttaccaataagaaa

SEQ ID NO: 330 - RNA, 19 nt, synthetic construct
  misc_feature 1..19: note = Synthetic: WV-38556
  misc_feature 1..19: note = Synthetic: SSR-0103843
  modified_base 1: mod_base = cm
  modified_base 2: mod_base = cm
  modified_base 3: mod_base = OTHER; note = 2-fluororibose adenine
  modified_base 4: mod_base = OTHER; note = 2-O-methylribose adenine
  modified_base 5: mod_base = OTHER; note = 2-fluororibose uracil
  modified_base 6: mod_base = OTHER; note = 2-O-methylribose adenine
  modified_base 7: mod_base = OTHER; note = 2-fluororibose adenine
  modified_base 8: mod_base = OTHER; note = 2-fluororibose guanine
  modified_base 9: mod_base = OTHER; note = 2-fluororibose adenine
  modified_base 10: mod_base = OTHER; note = 2-O-methylribose adenine
  modified_base 11: mod_base = OTHER; note = 2-fluororibose adenine
  modified_base 12: mod_base = OTHER; note = 2-O-methylribose adenine
  modified_base 13: mod_base = OTHER; note = 2-fluororibose uracil
  modified_base 14: mod_base = gm
  modified_base 15: mod_base = OTHER; note = 2-fluororibose adenine
  modified_base 16: mod_base = um
  modified_base 17: mod_base = OTHER; note = 2-fluororibose uracil
  modified_base 18: mod_base = um
  modified_base 19: mod_base = OTHER; note = 2-fluororibose adenine
  source 1..19: mol_type = other RNA
ccaataagaaaatgattta

SEQ ID NO: 331 - RNA, 19 nt, synthetic construct
  misc_feature 1..19: note = Synthetic: WV-38557
  misc_feature 1..19: note = Synthetic: SSR-0103824
  modified_base 1: mod_base = cm
  modified_base 2: mod_base = OTHER; note = 2-O-methylribose adenine
  modified_base 3: mod_base = OTHER; note = 2-fluororibose adenine
  modified_base 4: mod_base = um
  modified_base 5: mod_base = OTHER; note = 2-fluororibose adenine
  modified_base 6: mod_base = OTHER; note = 2-O-methylribose adenine
  modified_base 7: mod_base = OTHER; note = 2-fluororibose guanine
  modified_base 8: mod_base = OTHER; note = 2-fluororibose adenine
  modified_base 9: mod_base = OTHER; note = 2-fluororibose adenine
  modified_base 10: mod_base = OTHER; note = 2-O-methylribose adenine
  modified_base 11: mod_base = OTHER; note = 2-fluororibose adenine
  modified_base 12: mod_base = um
  modified_base 13: mod_base = OTHER; note = 2-fluororibose guanine
  modified_base 14: mod_base = OTHER; note = 2-O-methylribose adenine
  modified_base 15: mod_base = OTHER; note = 2-fluororibose uracil
  modified_base 16: mod_base = um
  modified_base 17: mod_base = OTHER; note = 2-fluororibose uracil
  modified_base 18: mod_base = um
  modified_base 19: mod_base = OTHER; note = 2-fluororibose adenine
  source 1..19: mol_type = other RNA
caataagaaaatgatttta

SEQ ID NO: 332 - RNA, 19 nt, synthetic construct
  misc_feature 1..19: note = Synthetic: WV-38558
  misc_feature 1..19: note = Synthetic: SSR-0103872
  modified_base 1: mod_base = gm
  modified_base 2: mod_base = OTHER; note = 2-O-methylribose adenine
  modified_base 3: mod_base = OTHER; note = 2-fluororibose adenine
  modified_base 4: mod_base = OTHER; note = 2-O-methylribose adenine
  modified_base 5: mod_base = OTHER; note = 2-fluororibose adenine
  modified_base 6: mod_base = um
  modified_base 7: mod_base = OTHER; note = 2-fluororibose guanine
  modified_base 8: mod_base = OTHER; note = 2-fluororibose adenine
  modified_base 9: mod_base = OTHER; note = 2-fluororibose uracil
  modified_base 10: mod_base = um
  modified_base 11: mod_base = OTHER; note = 2-fluororibose uracil
  modified_base 12: mod_base = um
  modified_base 13: mod_base = OTHER; note = 2-fluororibose uracil
  modified_base 14: mod_base = gm
  modified_base 15: mod_base = OTHER; note = 2-fluororibose uracil
  modified_base 16: mod_base = um
  modified_base 17: mod_base = OTHER; note = 2-fluororibose cytosine
  modified_base 18: mod_base = cm
  modified_base 19: mod_base = OTHER; note = 2-fluororibose adenine
  source 1..19: mol_type = other RNA
gaaaatgatttttgttcca

SEQ ID NO: 333 - RNA, 19 nt, synthetic construct
  misc_feature 1..19: note = Synthetic: WV-38559
  misc_feature 1..19: note = Synthetic: SSR-0103770
  modified_base 1: mod_base = OTHER; note = 2-O-methylribose adenine
  modified_base 2: mod_base = OTHER; note = 2-O-methylribose adenine
  modified_base 3: mod_base = OTHER; note = 2-fluororibose adenine
  modified_base 4: mod_base = um
  modified_base 5: mod_base = OTHER; note = 2-fluororibose cytosine
  modified_base 6: mod_base = OTHER; note = 2-O-methylribose adenine
  modified_base 7: mod_base = OTHER; note = 2-fluororibose adenine
  modified_base 8: mod_base = OTHER; note = 2-fluororibose adenine
  modified_base 9: mod_base = OTHER; note = 2-fluororibose adenine
  modified_base 10: mod_base = um
  modified_base 11: mod_base = OTHER; note = 2-fluororibose guanine
  modified_base 12: mod_base = OTHER; note = 2-O-methylribose adenine
  modified_base 13: mod_base = OTHER; note = 2-fluororibose adenine
  modified_base 14: mod_base = OTHER; note = 2-O-methylribose adenine
  modified_base 15: mod_base = OTHER; note = 2-fluororibose uracil
  modified_base 16: mod_base = gm
  modified_base 17: mod_base = OTHER; note = 2-fluororibose adenine
  modified_base 18: mod_base = OTHER; note = 2-O-methylribose adenine
  modified_base 19: mod_base = OTHER; note = 2-fluororibose adenine
  source 1..19: mol_type = other RNA
aaatcaaaatgaaatgaaa

SEQ ID NO: 334 - RNA, 19 nt, synthetic construct
  misc_feature 1..19: note = Synthetic: WV-38560
  misc_feature 1..19: note = Synthetic: SSR-0103955
  modified_base 1: mod_base = um
  modified_base 2: mod_base = gm
  modified_base 3: mod_base = OTHER; note = 2-fluororibose uracil
  modified_base 4: mod_base = OTHER; note = 2-O-methylribose adenine
  modified_base 5: mod_base = OTHER; note = 2-fluororibose uracil
  modified_base 6: mod_base = gm
  modified_base 7: mod_base = OTHER; note = 2-fluororibose cytosine
  modified_base 8: mod_base = OTHER; note = 2-fluororibose adenine
  modified_base 9: mod_base = OTHER; note = 2-fluororibose uracil
  modified_base 10: mod_base = gm
  modified_base 11: mod_base = OTHER; note = 2-fluororibose adenine
  modified_base 12: mod_base = um
  modified_base 13: mod_base = OTHER; note = 2-fluororibose adenine
  modified_base 14: mod_base = OTHER; note = 2-O-methylribose adenine
  modified_base 15: mod_base = OTHER; note = 2-fluororibose uracil
  modified_base 16: mod_base = gm
  modified_base 17: mod_base = OTHER; note = 2-fluororibose adenine
  modified_base 18: mod_base = um
  modified_base 19: mod_base = OTHER; note = 2-fluororibose adenine
  source 1..19: mol_type = other RNA
tgtatgcatgataatgata

SEQ ID NO: 335 - RNA, 19 nt, synthetic construct
  misc_feature 1..19: note = Synthetic: WV-38561
  misc_feature 1..19: note = Synthetic: SSR-0103887
  modified_base 1: mod_base = gm
  modified_base 2: mod_base = OTHER; note = 2-O-methylribose adenine
  modified_base 3: mod_base = OTHER; note = 2-fluororibose adenine
  modified_base 4: mod_base = um
  modified_base 5: mod_base = OTHER; note = 2-fluororibose cytosine
  modified_base 6: mod_base = OTHER; note = 2-O-methylribose adenine
  modified_base 7: mod_base = OTHER; note = 2-fluororibose adenine
  modified_base 8: mod_base = OTHER; note = 2-fluororibose uracil
  modified_base 9: mod_base = OTHER; note = 2-fluororibose guanine
  modified_base 10: mod_base = cm
  modified_base 11: mod_base = OTHER; note = 2-fluororibose uracil
  modified_base 12: mod_base = gm
  modified_base 13: mod_base = OTHER; note = 2-fluororibose cytosine
  modified_base 14: mod_base = OTHER; note = 2-O-methylribose adenine
  modified_base 15: mod_base = OTHER; note = 2-fluororibose adenine
  modified_base 16: mod_base = OTHER; note = 2-O-methylribose adenine
  modified_base 17: mod_base = OTHER; note = 2-fluororibose guanine
  modified_base 18: mod_base = cm
  modified_base 19: mod_base = OTHER; note = 2-fluororibose adenine
  source 1..19: mol_type = other RNA
gaatcaatgctgcaaagca

SEQ ID NO: 336 - RNA, 19 nt, synthetic construct
  misc_feature 1..19: note = Synthetic: WV-38562
  misc_feature 1..19: note = Synthetic: SSR-0103783
  modified_base 1: mod_base = OTHER; note = 2-O-methylribose adenine
  modified_base 2: mod_base = OTHER; note = 2-O-methylribose adenine
  modified_base 3: mod_base = OTHER; note = 2-fluororibose uracil
  modified_base 4: mod_base = cm
  modified_base 5: mod_base = OTHER; note = 2-fluororibose adenine
  modified_base 6: mod_base = OTHER; note = 2-O-methylribose adenine
  modified_base 7: mod_base = OTHER; note = 2-fluororibose uracil
  modified_base 8: mod_base = OTHER; note = 2-fluororibose guanine
  modified_base 9: mod_base = OTHER; note = 2-fluororibose cytosine
  modified_base 10: mod_base = um
  modified_base 11: mod_base = OTHER; note = 2-fluororibose guanine
  modified_base 12: mod_base = cm
  modified_base 13: mod_base = OTHER; note = 2-fluororibose adenine
  modified_base 14: mod_base = OTHER; note = 2-O-methylribose adenine
  modified_base 15: mod_base = OTHER; note = 2-fluororibose adenine
  modified_base 16: mod_base = gm
  modified_base 17: mod_base = OTHER; note = 2-fluororibose cytosine
  modified_base 18: mod_base = um
  modified_base 19: mod_base = OTHER; note = 2-fluororibose adenine
  source 1..19: mol_type = other RNA
aatcaatgctgcaaagcta

SEQ ID NO: 337 - RNA, 19 nt, synthetic construct
  misc_feature 1..19: note = Synthetic: WV-38563
  misc_feature 1..19: note = Synthetic: SSR-0103822
  modified_base 1: mod_base = cm
  modified_base 2: mod_base = OTHER; note = 2-O-methylribose adenine
  modified_base 3: mod_base = OTHER; note = 2-fluororibose adenine
  modified_base 4: mod_base = gm
  modified_base 5: mod_base = OTHER; note = 2-fluororibose adenine
  modified_base 6: mod_base = um
  modified_base 7: mod_base = OTHER; note = 2-fluororibose uracil
  modified_base 8: mod_base = OTHER; note = 2-fluororibose adenine
  modified_base 9: mod_base = OTHER; note = 2-fluororibose adenine
  modified_base 10: mod_base = um
  modified_base 11: mod_base = OTHER; note = 2-fluororibose uracil
  modified_base 12: mod_base = OTHER; note = 2-O-methylribose adenine
  modified_base 13: mod_base = OTHER; note = 2-fluororibose cytosine
  modified_base 14: mod_base = cm
  modified_base 15: mod_base = OTHER; note = 2-fluororibose uracil
  modified_base 16: mod_base = gm
  modified_base 17: mod_base = OTHER; note = 2-fluororibose uracil
  modified_base 18: mod_base = cm
  modified_base 19: mod_base = OTHER; note = 2-fluororibose adenine
  source 1..19: mol_type = other RNA
caagattaattacctgtca

SEQ ID NO: 338 - RNA, 19 nt, synthetic construct
  misc_feature 1..19: note = Synthetic: WV-38564
  misc_feature 1..19: note = Synthetic: SSR-0103865
  modified_base 1: mod_base = cm
  modified_base 2: mod_base = um
  modified_base 3: mod_base = OTHER; note = 2-fluororibose guanine
  modified_base 4: mod_base = um
  modified_base 5: mod_base = OTHER; note = 2-fluororibose cytosine
  modified_base 6: mod_base = um
  modified_base 7: mod_base = OTHER; note = 2-fluororibose uracil
  modified_base 8: mod_base = OTHER; note = 2-fluororibose cytosine
  modified_base 9: mod_base = OTHER; note = 2-fluororibose cytosine
  modified_base 10: mod_base = um
  modified_base 11: mod_base = OTHER; note = 2-fluororibose guanine
  modified_base 12: mod_base = um
  modified_base 13: mod_base = OTHER; note = 2-fluororibose uracil
  modified_base 14: mod_base = um
  modified_base 15: mod_base = OTHER; note = 2-fluororibose cytosine
  modified_base 16: mod_base = um
  modified_base 17: mod_base = OTHER; note = 2-fluororibose cytosine
  modified_base 18: mod_base = OTHER; note = 2-O-methylribose adenine
  modified_base 19: mod_base = OTHER; note = 2-fluororibose adenine
  source 1..19: mol_type = other RNA
ctgtcttcctgtttctcaa

SEQ ID NO: 339 - RNA, 19 nt, synthetic construct
  misc_feature 1..19: note = Synthetic: WV-38565
  misc_feature 1..19: note = Synthetic: SSR-0103950
  modified_base 1: mod_base = um
  modified_base 2: mod_base = cm
  modified_base 3: mod_base = OTHER; note = 2-fluororibose uracil
  modified_base 4: mod_base = um
  modified_base 5: mod_base = OTHER; note = 2-fluororibose cytosine
  modified_base 6: mod_base = cm
  modified_base 7: mod_base = OTHER; note = 2-fluororibose uracil
  modified_base 8: mod_base = OTHER; note = 2-fluororibose guanine
  modified_base 9: mod_base = OTHER; note = 2-fluororibose uracil
  modified_base 10: mod_base = um
  modified_base 11: mod_base = OTHER; note = 2-fluororibose uracil
  modified_base 12: mod_base = cm
  modified_base 13: mod_base = OTHER; note = 2-fluororibose uracil
  modified_base 14: mod_base = cm
  modified_base 15: mod_base = OTHER; note = 2-fluororibose adenine
  modified_base 16: mod_base = OTHER; note = 2-O-methylribose adenine
  modified_base 17: mod_base = OTHER; note = 2-fluororibose guanine
  modified_base 18: mod_base = OTHER; note = 2-O-methylribose adenine
  modified_base 19: mod_base = OTHER; note = 2-fluororibose adenine
  source 1..19: mol_type = other RNA
tcttcctgtttctcaagaa

SEQ ID NO: 340 - RNA, 19 nt, synthetic construct
  misc_feature 1..19: note = Synthetic: WV-38566
  misc_feature 1..19: note = Synthetic: SSR-0103869
  modified_base 1: mod_base = cm
  modified_base 2: mod_base = um
  modified_base 3: mod_base = OTHER; note = 2-fluororibose uracil
  modified_base 4: mod_base = cm
  modified_base 5: mod_base = OTHER; note = 2-fluororibose cytosine
  modified_base 6: mod_base = um
  modified_base 7: mod_base = OTHER; note = 2-fluororibose guanine
  modified_base 8: mod_base = OTHER; note = 2-fluororibose uracil
  modified_base 9: mod_base = OTHER; note = 2-fluororibose uracil
  modified_base 10: mod_base = um
  modified_base 11: mod_base = OTHER; note = 2-fluororibose cytosine
  modified_base 12: mod_base = um
  modified_base 13: mod_base = OTHER; note = 2-fluororibose cytosine
  modified_base 14: mod_base = OTHER; note = 2-O-methylribose adenine
  modified_base 15: mod_base = OTHER; note = 2-fluororibose adenine
  modified_base 16: mod_base = gm
  modified_base 17: mod_base = OTHER; note = 2-fluororibose adenine
  modified_base 18: mod_base = OTHER; note = 2-O-methylribose adenine
  modified_base 19: mod_base = OTHER; note = 2-fluororibose adenine
  source 1..19: mol_type = other RNA
cttcctgtttctcaagaaa

SEQ ID NO: 341 - RNA, 19 nt, synthetic construct
  misc_feature 1..19: note = Synthetic: WV-38567
  misc_feature 1..19: note = Synthetic: SSR-0103948
  modified_base 1: mod_base = um
  modified_base 2: mod_base = cm
  modified_base 3: mod_base = OTHER; note = 2-fluororibose cytosine
  modified_base 4: mod_base = um
  modified_base 5: mod_base = OTHER; note = 2-fluororibose guanine
  modified_base 6: mod_base = um
  modified_base 7: mod_base = OTHER; note = 2-fluororibose uracil
  modified_base 8: mod_base = OTHER; note = 2-fluororibose uracil
  modified_base 9: mod_base = OTHER; note = 2-fluororibose cytosine
  modified_base 10: mod_base = um
  modified_base 11: mod_base = OTHER; note = 2-fluororibose cytosine
  modified_base 12: mod_base = OTHER; note = 2-O-methylribose adenine
  modified_base 13: mod_base = OTHER; note = 2-fluororibose adenine
  modified_base 14: mod_base = gm
  modified_base 15: mod_base = OTHER; note = 2-fluororibose adenine
  modified_base 16: mod_base = OTHER; note = 2-O-methylribose adenine
  modified_base 17: mod_base = OTHER; note = 2-fluororibose uracil
  modified_base 18: mod_base = OTHER; note = 2-O-methylribose adenine
  modified_base 19: mod_base = OTHER; note = 2-fluororibose adenine
  source 1..19: mol_type = other RNA
tcctgtttctcaagaataa

SEQ ID NO: 342 - RNA, 19 nt, synthetic construct
  misc_feature 1..19: note = Synthetic: WV-38568
  misc_feature 1..19: note = Synthetic: SSR-0103855
  modified_base 1: mod_base = cm
  modified_base 2: mod_base = cm
  modified_base 3: mod_base = OTHER; note = 2-fluororibose uracil
  modified_base 4: mod_base = gm
  modified_base 5: mod_base = OTHER; note = 2-fluororibose uracil
  modified_base 6: mod_base = um
  modified_base 7: mod_base = OTHER; note = 2-fluororibose uracil
  modified_base 8: mod_base = OTHER; note = 2-fluororibose cytosine
  modified_base 9: mod_base = OTHER; note = 2-fluororibose uracil
  modified_base 10: mod_base = cm
  modified_base 11: mod_base = OTHER; note = 2-fluororibose adenine
  modified_base 12: mod_base = OTHER; note = 2-O-methylribose adenine
  modified_base 13: mod_base = OTHER; note = 2-fluororibose guanine
  modified_base 14: mod_base = OTHER; note = 2-O-methylribose adenine
  modified_base 15: mod_base = OTHER; note = 2-fluororibose adenine
  modified_base 16: mod_base = um
  modified_base 17: mod_base = OTHER; note = 2-fluororibose adenine
  modified_base 18: mod_base = um
  modified_base 19: mod_base = OTHER; note = 2-fluororibose adenine
  source 1..19: mol_type = other RNA
cctgtttctcaagaatata

SEQ ID NO: 343 - RNA, 19 nt, synthetic construct
  misc_feature 1..19: note = Synthetic: WV-38569
  misc_feature 1..19: note = Synthetic: SSR-0103808
  modified_base 1: mod_base = OTHER; note = 2-O-methylribose adenine
  modified_base 2: mod_base = gm
  modified_base 3: mod_base = OTHER; note = 2-fluororibose guanine
  modified_base 4: mod_base = um
  modified_base 5: mod_base = OTHER; note = 2-fluororibose cytosine
  modified_base 6: mod_base = um
  modified_base 7: mod_base = OTHER; note = 2-fluororibose guanine
  modified_base 8: mod_base = OTHER; note = 2-fluororibose uracil
  modified_base 9: mod_base = OTHER; note = 2-fluororibose uracil
  modified_base 10: mod_base = um
  modified_base 11: mod_base = OTHER; note = 2-fluororibose uracil
  modified_base 12: mod_base = um
  modified_base 13: mod_base = OTHER; note = 2-fluororibose cytosine
  modified_base 14: mod_base = cm
  modified_base 15: mod_base = OTHER; note = 2-fluororibose uracil
  modified_base 16: mod_base = um
  modified_base 17: mod_base = OTHER; note = 2-fluororibose uracil
  modified_base 18: mod_base = cm
  modified_base 19: mod_base = OTHER; note = 2-fluororibose adenine
  source 1..19: mol_type = other RNA
aggtctgtttttcctttca

SEQ ID NO: 344 - RNA, 19 nt, synthetic construct
  misc_feature 1..19: note = Synthetic: WV-38570
  misc_feature 1..19: note = Synthetic: SSR-0103931
  modified_base 1: mod_base = gm
  modified_base 2: mod_base = gm
  modified_base 3: mod_base = OTHER; note = 2-fluororibose uracil
  modified_base 4: mod_base = cm
  modified_base 5: mod_base = OTHER; note = 2-fluororibose uracil
  modified_base 6: mod_base = gm
  modified_base 7: mod_base = OTHER; note = 2-fluororibose uracil
  modified_base 8: mod_base = OTHER; note = 2-fluororibose uracil
  modified_base 9: mod_base = OTHER; note = 2-fluororibose uracil
  modified_base 10: mod_base = um
  modified_base 11: mod_base = OTHER; note = 2-fluororibose uracil
  modified_base 12: mod_base = cm
  modified_base 13: mod_base = OTHER; note = 2-fluororibose cytosine
  modified_base 14: mod_base = um
  modified_base 15: mod_base = OTHER; note = 2-fluororibose uracil
  modified_base 16: mod_base = um
  modified_base 17: mod_base = OTHER; note = 2-fluororibose cytosine
  modified_base 18: mod_base = OTHER; note = 2-O-methylribose adenine
  modified_base 19: mod_base = OTHER; note = 2-fluororibose adenine
  source 1..19: mol_type = other RNA
ggtctgtttttcctttcaa

SEQ ID NO: 345 - RNA, 19 nt, synthetic construct
  misc_feature 1..19: note = Synthetic: WV-38571
  misc_feature 1..19: note = Synthetic: SSR-0103866
  modified_base 1: mod_base = cm
  modified_base 2: mod_base = um
  modified_base 3: mod_base = OTHER; note = 2-fluororibose guanine
  modified_base 4: mod_base = um
  modified_base 5: mod_base = OTHER; note = 2-fluororibose guanine
  modified_base 6: mod_base = cm
  modified_base 7: mod_base = OTHER; note = 2-fluororibose uracil
  modified_base 8: mod_base = OTHER; note = 2-fluororibose uracil
  modified_base 9: mod_base = OTHER; note = 2-fluororibose adenine
  modified_base 10: mod_base = cm
  modified_base 11: mod_base = OTHER; note = 2-fluororibose adenine
  modified_base 12: mod_base = um
  modified_base 13: mod_base = OTHER; note = 2-fluororibose adenine
  modified_base 14: mod_base = OTHER; note = 2-O-methylribose adenine
  modified_base 15: mod_base = OTHER; note = 2-fluororibose adenine
  modified_base 16: mod_base = cm
  modified_base 17: mod_base = OTHER; note = 2-fluororibose adenine
  modified_base 18: mod_base = um
  modified_base 19: mod_base = OTHER; note = 2-fluororibose adenine
  source 1..19: mol_type = other RNA
ctgtgcttacataaacata

SEQ ID NO: 346 - RNA, 19 nt, synthetic construct
  misc_feature 1..19: note = Synthetic: WV-38572
  misc_feature 1..19: note = Synthetic: SSR-0103910
  modified_base 1: mod_base = gm
  modified_base 2: mod_base = cm
  modified_base 3: mod_base = OTHER; note = 2-fluororibose uracil
  modified_base 4: mod_base = um
  modified_base 5: mod_base = OTHER; note = 2-fluororibose adenine
  modified_base 6: mod_base = cm
  modified_base 7: mod_base = OTHER; note = 2-fluororibose adenine
  modified_base 8: mod_base = OTHER; note = 2-fluororibose uracil
  modified_base 9: mod_base = OTHER; note = 2-fluororibose adenine
  modified_base 10: mod_base = OTHER; note = 2-O-methylribose adenine
  modified_base 11: mod_base = OTHER; note = 2-fluororibose adenine
  modified_base 12: mod_base = cm
  modified_base 13: mod_base = OTHER; note = 2-fluororibose adenine
  modified_base 14: mod_base = um
  modified_base 15: mod_base = OTHER; note = 2-fluororibose adenine
  modified_base 16: mod_base = cm
  modified_base 17: mod_base = OTHER; note = 2-fluororibose uracil
  modified_base 18: mod_base = um
  modified_base 19: mod_base = OTHER; note = 2-fluororibose adenine
  source 1..19: mol_type = other RNA
gcttacataaacatactta

SEQ ID NO: 347 - RNA, 19 nt, synthetic construct
  misc_feature 1..19: note = Synthetic: WV-38573
  misc_feature 1..19: note = Synthetic: SSR-0103868
  modified_base 1: mod_base = cm
  modified_base 2: mod_base = um
  modified_base 3: mod_base = OTHER; note = 2-fluororibose uracil
  modified_base 4: mod_base = OTHER; note = 2-O-methylribose adenine
  modified_base 5: mod_base = OTHER; note = 2-fluororibose cytosine
  modified_base 6: mod_base = OTHER; note = 2-O-methylribose adenine
  modified_base 7: mod_base = OTHER; note = 2-fluororibose uracil
  modified_base 8: mod_base = OTHER; note = 2-fluororibose adenine
  modified_base 9: mod_base = OTHER; note = 2-fluororibose adenine
  modified_base 10: mod_base = OTHER; note = 2-O-methylribose adenine
  modified_base 11: mod_base = OTHER; note = 2-fluororibose cytosine
  modified_base 12: mod_base = OTHER; note = 2-O-methylribose adenine
  modified_base 13: mod_base = OTHER; note = 2-fluororibose uracil
  modified_base 14: mod_base = OTHER; note = 2-O-methylribose adenine
  modified_base 15: mod_base = OTHER; note = 2-fluororibose cytosine
  modified_base 16: mod_base = um
  modified_base 17: mod_base = OTHER; note = 2-fluororibose uracil
  modified_base 18: mod_base = OTHER; note = 2-O-methylribose adenine
  modified_base 19: mod_base = OTHER; note = 2-fluororibose adenine
  source 1..19: mol_type = other RNA
cttacataaacatacttaa

SEQ ID NO: 348 - RNA, 19 nt, synthetic construct
  misc_feature 1..19: note = Synthetic: WV-38574
  misc_feature 1..19: note = Synthetic: SSR-0103793
  modified_base 1: mod_base = OTHER; note = 2-O-methylribose adenine
  modified_base 2: mod_base = cm
  modified_base 3: mod_base = OTHER; note = 2-fluororibose uracil
  modified_base 4: mod_base = um
  modified_base 5: mod_base = OTHER; note = 2-fluororibose adenine
  modified_base 6: mod_base = OTHER; note = 2-O-methylribose adenine
  modified_base 7: mod_base = OTHER; note = 2-fluororibose adenine
  modified_base 8: mod_base = OTHER; note = 2-fluororibose adenine
  modified_base 9: mod_base = OTHER; note = 2-fluororibose guanine
  modified_base 10: mod_base = gm
  modified_base 11: mod_base = OTHER; note = 2-fluororibose uracil
  modified_base 12: mod_base = um
  modified_base 13: mod_base = OTHER; note = 2-fluororibose uracil
  modified_base 14: mod_base = um
  modified_base 15: mod_base = OTHER; note = 2-fluororibose cytosine
  modified_base 16: mod_base = um
  modified_base 17: mod_base = OTHER; note = 2-fluororibose uracil
  modified_base 18: mod_base = um
  modified_base 19: mod_base = OTHER; note = 2-fluororibose adenine
  source 1..19: mol_type = other RNA
acttaaaaggttttcttta

SEQ ID NO: 349 - RNA, 19 nt, synthetic construct
  misc_feature 1..19: note = Synthetic: WV-38575
  misc_feature 1..19: note = Synthetic: SSR-0103867
  modified_base 1: mod_base = cm
  modified_base 2: mod_base = um
  modified_base 3: mod_base = OTHER; note = 2-fluororibose uracil
  modified_base 4: mod_base = OTHER; note = 2-O-methylribose adenine
  modified_base 5: mod_base = OTHER; note = 2-fluororibose adenine
  modified_base 6: mod_base = OTHER; note = 2-O-methylribose adenine
  modified_base 7: mod_base = OTHER; note = 2-fluororibose adenine
  modified_base 8: mod_base = OTHER; note = 2-fluororibose guanine
  modified_base 9: mod_base = OTHER; note = 2-fluororibose guanine
  modified_base 10: mod_base = um
  modified_base 11: mod_base = OTHER; note = 2-fluororibose uracil
  modified_base 12: mod_base = um
  modified_base 13: mod_base = OTHER; note = 2-fluororibose uracil
  modified_base 14: mod_base = cm
  modified_base 15: mod_base = OTHER; note = 2-fluororibose uracil
  modified_base 16: mod_base = um
  modified_base 17: mod_base = OTHER; note = 2-fluororibose uracil
  modified_base 18: mod_base = OTHER; note = 2-O-methylribose adenine
  modified_base 19: mod_base = OTHER; note = 2-fluororibose adenine
  source 1..19: mol_type = other RNA
cttaaaaggttttctttaa

SEQ ID NO: 350 - RNA, 19 nt, synthetic construct
  misc_feature 1..19: note = Synthetic: WV-38576
  misc_feature 1..19: note = Synthetic: SSR-0103769
  modified_base 1: mod_base = OTHER; note = 2-O-methylribose adenine
  modified_base 2: mod_base = OTHER; note = 2-O-methylribose adenine
  modified_base 3: mod_base = OTHER; note = 2-fluororibose adenine
  modified_base 4: mod_base = gm
  modified_base 5: mod_base = OTHER; note = 2-fluororibose guanine
  modified_base 6: mod_base = um
  modified_base 7: mod_base = OTHER; note = 2-fluororibose uracil
  modified_base 8: mod_base = OTHER; note = 2-fluororibose uracil
  modified_base 9: mod_base = OTHER; note = 2-fluororibose uracil
  modified_base 10: mod_base = cm
  modified_base 11: mod_base = OTHER; note = 2-fluororibose uracil
  modified_base 12: mod_base = um
  modified_base 13: mod_base = OTHER; note = 2-fluororibose uracil
  modified_base 14: mod_base = OTHER; note = 2-O-methylribose adenine
  modified_base 15: mod_base = OTHER; note = 2-fluororibose adenine
  modified_base 16: mod_base = gm
  modified_base 17: mod_base = OTHER; note = 2-fluororibose adenine
  modified_base 18: mod_base = um
  modified_base 19: mod_base = OTHER; note = 2-fluororibose adenine
  source 1..19: mol_type = other RNA
aaaggttttctttaagata

SEQ ID NO: 351 - RNA, 19 nt, synthetic construct
  misc_feature 1..19: note = Synthetic: WV-38577
  misc_feature 1..19: note = Synthetic: SSR-0103809
  modified_base 1: mod_base = OTHER; note = 2-O-methylribose adenine
  modified_base 2: mod_base = gm
  modified_base 3: mod_base = OTHER; note = 2-fluororibose guanine
  modified_base 4: mod_base = um
  modified_base 5: mod_base = OTHER; note = 2-fluororibose uracil
  modified_base 6: mod_base = um
  modified_base 7: mod_base = OTHER; note = 2-fluororibose uracil
  modified_base 8: mod_base = OTHER; note = 2-fluororibose cytosine
  modified_base 9: mod_base = OTHER; note = 2-fluororibose uracil
  modified_base 10: mod_base = um
  modified_base 11: mod_base = OTHER; note = 2-fluororibose uracil
  modified_base 12: mod_base = OTHER; note = 2-O-methylribose adenine
  modified_base 13: mod_base = OTHER; note = 2-fluororibose adenine
  modified_base 14: mod_base = gm
  modified_base 15: mod_base = OTHER; note = 2-fluororibose adenine
  modified_base 16: mod_base = um
  modified_base 17: mod_base = OTHER; note = 2-fluororibose adenine
  modified_base 18: mod_base = um
  modified_base 19: mod_base = OTHER; note = 2-fluororibose adenine
  source 1..19: mol_type = other RNA
aggttttctttaagatata

SEQ ID NO: 352 - RNA, 19 nt, synthetic construct
  misc_feature 1..19: note = Synthetic: WV-38578
  misc_feature 1..19: note = Synthetic: SSR-0103936
  modified_base 1: mod_base = gm
  modified_base 2: mod_base = gm
  modified_base 3: mod_base = OTHER; note = 2-fluororibose uracil
  modified_base 4: mod_base = um
  modified_base 5: mod_base = OTHER; note = 2-fluororibose uracil
  modified_base 6: mod_base = um
  modified_base 7: mod_base = OTHER; note = 2-fluororibose cytosine
  modified_base 8: mod_base = OTHER; note = 2-fluororibose uracil
  modified_base 9: mod_base = OTHER; note = 2-fluororibose uracil
  modified_base 10: mod_base = um
  modified_base 11: mod_base = OTHER; note = 2-fluororibose adenine
  modified_base 12: mod_base = OTHER; note = 2-O-methylribose adenine
  modified_base 13: mod_base = OTHER; note = 2-fluororibose guanine
  modified_base 14: mod_base = OTHER; note = 2-O-methylribose adenine
  modified_base 15: mod_base = OTHER; note = 2-fluororibose uracil
  modified_base 16: mod_base = OTHER; note = 2-O-methylribose adenine
  modified_base 17: mod_base = OTHER; note = 2-fluororibose uracil
  modified_base 18: mod_base = um
  modified_base 19: mod_base = OTHER; note = 2-fluororibose adenine
  source 1..19: mol_type = other RNA
ggttttctttaagatatta

SEQ ID NO: 353 - RNA, 19 nt, synthetic construct
  misc_feature 1..19: note = Synthetic: WV-38579
  misc_feature 1..19: note = Synthetic: SSR-0103849
  modified_base 1: mod_base = cm
  modified_base 2: mod_base = cm
  modified_base 3: mod_base = OTHER; note = 2-fluororibose adenine
  modified_base 4: mod_base = um
  modified_base 5: mod_base = OTHER; note = 2-fluororibose uracil
  modified_base 6: mod_base = um
  modified_base 7: mod_base = OTHER; note = 2-fluororibose adenine
  modified_base 8: mod_base = OTHER; note = 2-fluororibose adenine
  modified_base 9: mod_base = OTHER; note = 2-fluororibose adenine
  modified_base 10: mod_base = gm
  modified_base 11: mod_base = OTHER; note = 2-fluororibose guanine
  modified_base 12: mod_base = um
  modified_base 13: mod_base = OTHER; note = 2-fluororibose guanine
  modified_base 14: mod_base = gm
  modified_base 15: mod_base = OTHER; note = 2-fluororibose adenine
  modified_base 16: mod_base = cm
  modified_base 17: mod_base = OTHER; note = 2-fluororibose adenine
  modified_base 18: mod_base = OTHER; note = 2-O-methylribose adenine
  modified_base 19: mod_base = OTHER; note = 2-fluororibose adenine
  source 1..19: mol_type = other RNA
ccatttaaaggtggacaaa

SEQ ID NO: 354 - RNA, 19 nt, synthetic construct
  misc_feature 1..19: note = Synthetic: WV-38580
  misc_feature 1..19: note = Synthetic: SSR-0103839
  modified_base 1: mod_base = cm
  modified_base 2: mod_base = OTHER; note = 2-O-methylribose adenine
  modified_base 3: mod_base = OTHER; note = 2-fluororibose uracil
  modified_base 4: mod_base = um
  modified_base 5: mod_base = OTHER; note = 2-fluororibose uracil
  modified_base 6: mod_base = OTHER; note = 2-O-methylribose adenine
  modified_base 7: mod_base = OTHER; note = 2-fluororibose adenine
  modified_base 8: mod_base = OTHER; note = 2-fluororibose adenine
  modified_base 9: mod_base = OTHER; note = 2-fluororibose guanine
  modified_base 10: mod_base = gm
  modified_base 11: mod_base = OTHER; note = 2-fluororibose uracil
  modified_base 12: mod_base = gm
  modified_base 13: mod_base = OTHER; note = 2-fluororibose guanine
  modified_base 14: mod_base = OTHER; note = 2-O-methylribose adenine
  modified_base 15: mod_base = OTHER; note = 2-fluororibose cytosine
  modified_base 16: mod_base = OTHER; note = 2-O-methylribose adenine
  modified_base 17: mod_base = OTHER; note = 2-fluororibose adenine
  modified_base 18: mod_base = OTHER; note = 2-O-methylribose adenine
  modified_base 19: mod_base = OTHER; note = 2-fluororibose adenine
  source 1..19: mol_type = other RNA
catttaaaggtggacaaaa

SEQ ID NO: 355 - RNA, 19 nt, synthetic construct
  misc_feature 1..19: note = Synthetic: WV-38581
  misc_feature 1..19: note = Synthetic: SSR-0103859
  modified_base 1: mod_base = cm
  modified_base 2: mod_base = um
  modified_base 3: mod_base = OTHER; note = 2-fluororibose adenine
  modified_base 4: mod_base = cm
  modified_base 5: mod_base = OTHER; note = 2-fluororibose cytosine
  modified_base 6: mod_base = um
  modified_base 7: mod_base = OTHER; note = 2-fluororibose cytosine
  modified_base 8: mod_base = OTHER; note = 2-fluororibose cytosine
  modified_base 9: mod_base = OTHER; note = 2-fluororibose cytosine
  modified_base 10: mod_base = um
  modified_base 11: mod_base = OTHER; note = 2-fluororibose adenine
  modified_base 12: mod_base = OTHER; note = 2-O-methylribose adenine
  modified_base 13: mod_base = OTHER; note = 2-fluororibose adenine
  modified_base 14: mod_base = OTHER; note = 2-O-methylribose adenine
  modified_base 15: mod_base = OTHER; note = 2-fluororibose guanine
  modified_base 16: mod_base = um
  modified_base 17: mod_base = OTHER; note = 2-fluororibose adenine
  modified_base 18: mod_base = OTHER; note = 2-O-methylribose adenine
  modified_base 19: mod_base = OTHER; note = 2-fluororibose adenine
  source 1..19: mol_type = other RNA
ctacctccctaaaagtaaa

SEQ ID NO: 356 - RNA, 19 nt, synthetic construct
  misc_feature 1..19: note = Synthetic: WV-38582
  misc_feature 1..19: note = Synthetic: SSR-0103852
  modified_base 1: mod_base = cm
  modified_base 2: mod_base = cm
  modified_base 3: mod_base = OTHER; note = 2-fluororibose cytosine
  modified_base 4: mod_base = um
  modified_base 5: mod_base = OTHER; note = 2-fluororibose adenine
  modified_base 6: mod_base = OTHER; note = 2-O-methylribose adenine
  modified_base 7: mod_base = OTHER; note = 2-fluororibose adenine
  modified_base 8: mod_base = OTHER; note = 2-fluororibose adenine
  modified_base 9: mod_base = OTHER; note = 2-fluororibose guanine
  modified_base 10: mod_base = um
  modified_base 11: mod_base = OTHER; note = 2-fluororibose adenine
  modified_base 12: mod_base = OTHER; note = 2-O-methylribose adenine
  modified_base 13: mod_base = OTHER; note = 2-fluororibose adenine
  modified_base 14: mod_base = um
  modified_base 15: mod_base = OTHER; note = 2-fluororibose adenine
  modified_base 16: mod_base = cm
  modified_base 17: mod_base = OTHER; note = 2-fluororibose adenine
  modified_base 18: mod_base = OTHER; note = 2-O-methylribose adenine
  modified_base 19: mod_base = OTHER; note = 2-fluororibose adenine
  source 1..19: mol_type = other RNA
ccctaaaagtaaatacaaa

SEQ ID NO: 357 - RNA, 19 nt, synthetic construct
  misc_feature 1..19: note = Synthetic: WV-38583
  misc_feature 1..19: note = Synthetic: SSR-0103858
  modified_base 1: mod_base = cm
  modified_base 2: mod_base = um
  modified_base 3: mod_base = OTHER; note = 2-fluororibose adenine
  modified_base 4: mod_base = OTHER; note = 2-O-methylribose adenine
  modified_base 5: mod_base = OTHER; note = 2-fluororibose adenine
  modified_base 6: mod_base = OTHER; note = 2-O-methylribose adenine
  modified_base 7: mod_base = OTHER; note = 2-fluororibose guanine
  modified_base 8: mod_base = OTHER; note = 2-fluororibose uracil
  modified_base 9: mod_base = OTHER; note = 2-fluororibose adenine
  modified_base 10: mod_base = OTHER; note = 2-O-methylribose adenine
  modified_base 11: mod_base = OTHER; note = 2-fluororibose adenine
  modified_base 12: mod_base = um
  modified_base 13: mod_base = OTHER; note = 2-fluororibose adenine
  modified_base 14: mod_base = cm
  modified_base 15: mod_base = OTHER; note = 2-fluororibose adenine
  modified_base 16: mod_base = OTHER; note = 2-O-methylribose adenine
  modified_base 17: mod_base = OTHER; note = 2-fluororibose adenine
  modified_base 18: mod_base = gm
  modified_base 19: mod_base = OTHER; note = 2-fluororibose adenine
  source 1..19: mol_type = other RNA
ctaaaagtaaatacaaaga

SEQ ID NO: 358 - RNA, 19 nt, synthetic construct
  misc_feature 1..19: note = Synthetic: WV-38584
  misc_feature 1..19: note = Synthetic: SSR-0103928
  modified_base 1: mod_base = gm
  modified_base 2: mod_base = gm
  modified_base 3: mod_base = OTHER; note = 2-fluororibose guanine
  modified_base 4: mod_base = OTHER; note = 2-O-methylribose adenine
  modified_base 5: mod_base = OTHER; note = 2-fluororibose adenine
  modified_base 6: mod_base = gm
  modified_base 7: mod_base = OTHER; note = 2-fluororibose guanine
  modified_base 8: mod_base = OTHER; note = 2-fluororibose uracil
  modified_base 9: mod_base = OTHER; note = 2-fluororibose uracil
  modified_base 10: mod_base = um
  modified_base 11: mod_base = OTHER; note = 2-fluororibose adenine
  modified_base 12: mod_base = OTHER; note = 2-O-methylribose adenine
  modified_base 13: mod_base = OTHER; note = 2-fluororibose guanine
  modified_base 14: mod_base = OTHER; note = 2-O-methylribose adenine
  modified_base 15: mod_base = OTHER; note = 2-fluororibose cytosine
  modified_base 16: mod_base = um
  modified_base 17: mod_base = OTHER; note = 2-fluororibose guanine
  modified_base 18: mod_base = um
  modified_base 19: mod_base = OTHER; note = 2-fluororibose adenine
  source 1..19: mol_type = other RNA
gggaaggtttaagactgta

SEQ ID NO: 359 - RNA, 19 nt, synthetic construct
  misc_feature 1..19: note = Synthetic: WV-38585
  misc_feature 1..19: note = Synthetic: SSR-0103878
  modified_base 1: mod_base = gm
  modified_base 2: mod_base = OTHER; note = 2-O-methylribose adenine
  modified_base 3: mod_base = OTHER; note = 2-fluororibose adenine
  modified_base 4: mod_base = gm
  modified_base 5: mod_base = OTHER; note = 2-fluororibose guanine
  modified_base 6: mod_base = um
  modified_base 7: mod_base = OTHER; note = 2-fluororibose uracil
  modified_base 8: mod_base = OTHER; note = 2-fluororibose uracil
  modified_base 9: mod_base = OTHER; note = 2-fluororibose adenine
  modified_base 10: mod_base = OTHER; note = 2-O-methylribose adenine
  modified_base 11: mod_base = OTHER; note = 2-fluororibose guanine
  modified_base 12: mod_base = OTHER; note = 2-O-methylribose adenine
  modified_base 13: mod_base = OTHER; note = 2-fluororibose cytosine
  modified_base 14: mod_base = um
  modified_base 15: mod_base = OTHER; note = 2-fluororibose guanine
  modified_base 16: mod_base = um
  modified_base 17: mod_base = OTHER; note = 2-fluororibose uracil
  modified_base 18: mod_base = cm
  modified_base 19: mod_base = OTHER; note = 2-fluororibose adenine
  source 1..19: mol_type = other RNA
gaaggtttaagactgttca

SEQ ID NO: 360 - RNA, 19 nt, synthetic construct
  misc_feature 1..19: note = Synthetic: WV-38586
  misc_feature 1..19: note = Synthetic: SSR-0103776
  modified_base 1: mod_base = OTHER; note = 2-O-methylribose adenine
  modified_base 2: mod_base = OTHER; note = 2-O-methylribose adenine
  modified_base 3: mod_base = OTHER; note = 2-fluororibose guanine
  modified_base 4: mod_base = gm
  modified_base 5: mod_base = OTHER; note = 2-fluororibose uracil
  modified_base 6: mod_base = um
  modified_base 7: mod_base = OTHER; note = 2-fluororibose uracil
  modified_base 8: mod_base = OTHER; note = 2-fluororibose adenine
  modified_base 9: mod_base = OTHER; note = 2-fluororibose adenine
  modified_base 10: mod_base = gm
  modified_base 11: mod_base = OTHER; note = 2-fluororibose adenine
  modified_base 12: mod_base = cm
  modified_base 13: mod_base = OTHER; note = 2-fluororibose uracil
  modified_base 14: mod_base = gm
  modified_base 15: mod_base = OTHER; note = 2-fluororibose uracil
  modified_base 16: mod_base = um
  modified_base 17: mod_base = OTHER; note = 2-fluororibose cytosine
  modified_base 18: mod_base = OTHER; note = 2-O-methylribose adenine
  modified_base 19: mod_base = OTHER; note = 2-fluororibose adenine
  source 1..19: mol_type = other RNA
aaggtttaagactgttcaa

SEQ ID NO: 361 - RNA, 19 nt, synthetic construct
  misc_feature 1..19: note = Synthetic: WV-38587
  misc_feature 1..19: note = Synthetic: SSR-0103935
  modified_base 1: mod_base = gm
  modified_base 2: mod_base = gm
  modified_base 3: mod_base = OTHER; note = 2-fluororibose uracil
  modified_base 4: mod_base = um
  modified_base 5: mod_base = OTHER; note = 2-fluororibose uracil
  modified_base 6: mod_base = OTHER; note = 2-O-methylribose adenine
  modified_base 7: mod_base = OTHER; note = 2-fluororibose adenine
  modified_base 8: mod_base = OTHER; note = 2-fluororibose guanine
  modified_base 9: mod_base = OTHER; note = 2-fluororibose adenine
  modified_base 10: mod_base = cm
  modified_base 11: mod_base = OTHER; note = 2-fluororibose uracil
  modified_base 12: mod_base = gm
  modified_base 13: mod_base = OTHER; note = 2-fluororibose uracil
  modified_base 14: mod_base = um
  modified_base 15: mod_base = OTHER; note = 2-fluororibose cytosine
  modified_base 16: mod_base = OTHER; note = 2-O-methylribose adenine
  modified_base 17: mod_base = OTHER; note = 2-fluororibose adenine
  modified_base 18: mod_base = gm
  modified_base 19: mod_base = OTHER; note = 2-fluororibose adenine
  source 1..19: mol_type = other RNA
ggtttaagactgttcaaga

SEQ ID NO: 362 - RNA, 19 nt, synthetic construct
  misc_feature 1..19: note = Synthetic: WV-38588
  misc_feature 1..19: note = Synthetic: SSR-0103941
  modified_base 1: mod_base = gm
  modified_base 2: mod_base = um
  modified_base 3: mod_base = OTHER; note = 2-fluororibose uracil
  modified_base 4: mod_base = um
  modified_base 5: mod_base = OTHER; note = 2-fluororibose adenine
  modified_base 6: mod_base = OTHER; note = 2-O-methylribose adenine
  modified_base 7: mod_base = OTHER; note = 2-fluororibose guanine
  modified_base 8: mod_base = OTHER; note = 2-fluororibose adenine
  modified_base 9: mod_base = OTHER; note = 2-fluororibose cytosine
  modified_base 10: mod_base = um
  modified_base 11: mod_base = OTHER; note = 2-fluororibose guanine
  modified_base 12: mod_base = um
  modified_base 13: mod_base = OTHER; note = 2-fluororibose uracil
  modified_base 14: mod_base = cm
  modified_base 15: mod_base = OTHER; note = 2-fluororibose adenine
  modified_base 16: mod_base = OTHER; note = 2-O-methylribose adenine
  modified_base 17: mod_base = OTHER; note = 2-fluororibose guanine
  modified_base 18: mod_base = um
  modified_base 19: mod_base = OTHER; note = 2-fluororibose adenine
  source 1..19: mol_type = other RNA
gtttaagactgttcaagta

SEQ ID NO: 363 - RNA, 19 nt, synthetic construct
  misc_feature 1..19: note = Synthetic: WV-38589
  misc_feature 1..19: note = Synthetic: SSR-0103798
  modified_base 1: mod_base = OTHER; note = 2-O-methylribose adenine
  modified_base 2: mod_base = gm
  modified_base 3: mod_base = OTHER; note = 2-fluororibose adenine
  modified_base 4: mod_base = cm
  modified_base 5: mod_base = OTHER; note = 2-fluororibose uracil
  modified_base 6: mod_base = gm
  modified_base 7: mod_base = OTHER; note = 2-fluororibose uracil
  modified_base 8: mod_base = OTHER; note = 2-fluororibose uracil
  modified_base 9: mod_base = OTHER; note = 2-fluororibose cytosine
  modified_base 10: mod_base = OTHER; note = 2-O-methylribose adenine
  modified_base 11: mod_base = OTHER; note = 2-fluororibose adenine
  modified_base 12: mod_base = gm
  modified_base 13: mod_base = OTHER; note = 2-fluororibose uracil
  modified_base 14: mod_base = OTHER; note = 2-O-methylribose adenine
  modified_base 15: mod_base = OTHER; note = 2-fluororibose guanine
  modified_base 16: mod_base = cm
  modified_base 17: mod_base = OTHER; note = 2-fluororibose adenine
  modified_base 18: mod_base = um
  modified_base 19: mod_base = OTHER; note = 2-fluororibose adenine
  source 1..19: mol_type = other RNA
agactgttcaagtagcata

SEQ ID NO: 364 - RNA, 19 nt, synthetic construct
  misc_feature 1..19: note = Synthetic: WV-38590
  misc_feature 1..19: note = Synthetic: SSR-0103957
  modified_base 1: mod_base = um
  modified_base 2: mod_base = gm
  modified_base 3: mod_base = OTHER; note = 2-fluororibose uracil
  modified_base 4: mod_base = um
  modified_base 5: mod_base = OTHER; note = 2-fluororibose cytosine
  modified_base 6: mod_base = OTHER; note = 2-O-methylribose adenine
  modified_base 7: mod_base = OTHER; note = 2-fluororibose adenine
  modified_base 8: mod_base = OTHER; note = 2-fluororibose guanine
  modified_base 9: mod_base = OTHER; note = 2-fluororibose uracil
  modified_base 10: mod_base = OTHER; note = 2-O-methylribose adenine
  modified_base 11: mod_base = OTHER; note = 2-fluororibose guanine
  modified_base 12: mod_base = cm
  modified_base 13: mod_base = OTHER; note = 2-fluororibose adenine
  modified_base 14: mod_base = um
  modified_base 15: mod_base = OTHER; note = 2-fluororibose uracil
  modified_base 16: mod_base = cm
  modified_base 17: mod_base = OTHER; note = 2-fluororibose cytosine
  modified_base 18: mod_base = OTHER; note = 2-O-methylribose adenine
  modified_base 19: mod_base = OTHER; note = 2-fluororibose adenine
  source 1..19: mol_type = other RNA
tgttcaagtagcattccaa

SEQ ID NO: 365 - RNA, 19 nt, synthetic construct
  misc_feature 1..19: note = Synthetic: WV-38591
  misc_feature 1..19: note = Synthetic: SSR-0103940
  modified_base 1: mod_base = gm
  modified_base 2: mod_base = um
  modified_base 3: mod_base = OTHER; note = 2-fluororibose uracil
  modified_base 4: mod_base = cm
  modified_base 5: mod_base = OTHER; note = 2-fluororibose adenine
  modified_base 6: mod_base = OTHER; note = 2-O-methylribose adenine
  modified_base 7: mod_base = OTHER; note = 2-fluororibose guanine
  modified_base 8: mod_base = OTHER; note = 2-fluororibose uracil
  modified_base 9: mod_base = OTHER; note = 2-fluororibose adenine
  modified_base 10: mod_base = gm
  modified_base 11: mod_base = OTHER; note = 2-fluororibose cytosine
  modified_base 12: mod_base = OTHER; note = 2-O-methylribose adenine
  modified_base 13: mod_base = OTHER; note = 2-fluororibose uracil
  modified_base 14: mod_base = um
  modified_base 15: mod_base = OTHER; note = 2-fluororibose cytosine
  modified_base 16: mod_base = cm
  modified_base 17: mod_base = OTHER; note = 2-fluororibose adenine
  modified_base 18: mod_base = OTHER; note = 2-O-methylribose adenine
  modified_base 19: mod_base = OTHER; note = 2-fluororibose adenine
  source 1..19: mol_type = other RNA
gttcaagtagcattccaaa

SEQ ID NO: 366 - RNA, 19 nt, synthetic construct
  misc_feature 1..19: note = Synthetic: WV-38592
  misc_feature 1..19: note = Synthetic: SSR-0103810
  modified_base 1: mod_base = OTHER; note = 2-O-methylribose adenine
  modified_base 2: mod_base = gm
  modified_base 3: mod_base = OTHER; note = 2-fluororibose uracil
  modified_base 4: mod_base = OTHER; note = 2-O-methylribose adenine
  modified_base 5: mod_base = OTHER; note = 2-fluororibose guanine
  modified_base 6: mod_base = cm
  modified_base 7: mod_base = OTHER; note = 2-fluororibose adenine
  modified_base 8: mod_base = OTHER; note = 2-fluororibose uracil
  modified_base 9: mod_base = OTHER; note = 2-fluororibose uracil
  modified_base 10: mod_base = cm
  modified_base 11: mod_base = OTHER; note = 2-fluororibose cytosine
  modified_base 12: mod_base = OTHER; note = 2-O-methylribose adenine
  modified_base 13: mod_base = OTHER; note = 2-fluororibose adenine
  modified_base 14: mod_base = um
  modified_base 15: mod_base = OTHER; note = 2-fluororibose cytosine
  modified_base 16: mod_base = um
  modified_base 17: mod_base = OTHER; note = 2-fluororibose guanine
  modified_base 18: mod_base = um
  modified_base 19: mod_base = OTHER; note = 2-fluororibose adenine
  source 1..19: mol_type = other RNA
agtagcattccaatctgta

SEQ ID NO: 367 - RNA, 19 nt, synthetic construct
  misc_feature 1..19: note = Synthetic: WV-38593
  misc_feature 1..19: note = Synthetic: SSR-0103844
  modified_base 1: mod_base = cm
  modified_base 2: mod_base = cm
  modified_base 3: mod_base = OTHER; note = 2-fluororibose adenine
  modified_base 4: mod_base = cm
  modified_base 5: mod_base = OTHER; note = 2-fluororibose adenine
  modified_base 6: mod_base = gm
  modified_base 7: mod_base = OTHER; note = 2-fluororibose adenine
  modified_base 8: mod_base = OTHER; note = 2-fluororibose adenine
  modified_base 9: mod_base = OTHER; note = 2-fluororibose uracil
  modified_base 10: mod_base = OTHER; note = 2-O-methylribose adenine
  modified_base 11: mod_base = OTHER; note = 2-fluororibose uracil
  modified_base 12: mod_base = cm
  modified_base 13: mod_base = OTHER; note = 2-fluororibose adenine
  modified_base 14: mod_base = OTHER; note = 2-O-methylribose adenine
  modified_base 15: mod_base = OTHER; note = 2-fluororibose cytosine
  modified_base 16: mod_base = OTHER; note = 2-O-methylribose adenine
  modified_base 17: mod_base = OTHER; note = 2-fluororibose adenine
  modified_base 18: mod_base = gm
  modified_base 19: mod_base = OTHER; note = 2-fluororibose adenine
  source 1..19: mol_type = other RNA
ccacagaatatcaacaaga

SEQ ID NO: 368 - RNA, 19 nt, synthetic construct
  misc_feature 1..19: note = Synthetic: WV-38594
  misc_feature 1..19: note = Synthetic: SSR-0103828
  modified_base 1: mod_base = cm
  modified_base 2: mod_base = OTHER; note = 2-O-methylribose adenine
  modified_base 3: mod_base = OTHER; note = 2-fluororibose cytosine
  modified_base 4: mod_base = OTHER; note = 2-O-methylribose adenine
  modified_base 5: mod_base = OTHER; note = 2-fluororibose guanine
  modified_base 6: mod_base = OTHER; note = 2-O-methylribose adenine
  modified_base 7: mod_base = OTHER; note = 2-fluororibose adenine
  modified_base 8: mod_base = OTHER; note = 2-fluororibose uracil
  modified_base 9: mod_base = OTHER; note = 2-fluororibose adenine
  modified_base 10: mod_base = um
  modified_base 11: mod_base = OTHER; note = 2-fluororibose cytosine
  modified_base 12: mod_base = OTHER; note = 2-O-methylribose adenine
  modified_base 13: mod_base = OTHER; note = 2-fluororibose adenine
  modified_base 14: mod_base = cm
  modified_base 15: mod_base = OTHER; note = 2-fluororibose adenine
  modified_base 16: mod_base = OTHER; note = 2-O-methylribose adenine
  modified_base 17: mod_base = OTHER; note = 2-fluororibose guanine
  modified_base 18: mod_base = OTHER; note = 2-O-methylribose adenine
  modified_base 19: mod_base = OTHER; note = 2-fluororibose adenine
  source 1..19: mol_type = other RNA
cacagaatatcaacaagaa

SEQ ID NO: 369 - RNA, 19 nt, synthetic construct
  misc_feature 1..19: note = Synthetic: WV-38595
  misc_feature 1..19: note = Synthetic: SSR-0103830
  modified_base 1: mod_base = cm
  modified_base 2: mod_base = OTHER; note = 2-O-methylribose adenine
  modified_base 3: mod_base = OTHER; note = 2-fluororibose guanine
  modified_base 4: mod_base = OTHER; note = 2-O-methylribose adenine
  modified_base 5: mod_base = OTHER; note = 2-fluororibose adenine
  modified_base 6: mod_base = um
  modified_base 7: mod_base = OTHER; note = 2-fluororibose adenine
  modified_base 8: mod_base = OTHER; note = 2-fluororibose uracil
  modified_base 9: mod_base = OTHER; note = 2-fluororibose cytosine
  modified_base 10: mod_base = OTHER; note = 2-O-methylribose adenine
  modified_base 11: mod_base = OTHER; note = 2-fluororibose adenine
  modified_base 12: mod_base = cm
  modified_base 13: mod_base = OTHER; note = 2-fluororibose adenine
  modified_base 14: mod_base = OTHER; note = 2-O-methylribose adenine
  modified_base 15: mod_base = OTHER; note = 2-fluororibose guanine
  modified_base 16: mod_base = OTHER; note = 2-O-methylribose adenine
  modified_base 17: mod_base = OTHER; note = 2-fluororibose adenine
  modified_base 18: mod_base = cm
  modified_base 19: mod_base = OTHER; note = 2-fluororibose adenine
  source 1..19: mol_type = other RNA
cagaatatcaacaagaaca

SEQ ID NO: 370 - RNA, 19 nt, synthetic construct
  misc_feature 1..19: note = Synthetic: WV-38596
  misc_feature 1..19: note = Synthetic: SSR-0103886
  modified_base 1: mod_base = gm
  modified_base 2: mod_base = OTHER; note = 2-O-methylribose adenine
  modified_base 3: mod_base = OTHER; note = 2-fluororibose adenine
  modified_base 4: mod_base = um
  modified_base 5: mod_base = OTHER; note = 2-fluororibose adenine
  modified_base 6: mod_base = um
  modified_base 7: mod_base = OTHER; note = 2-fluororibose cytosine
  modified_base 8: mod_base = OTHER; note = 2-fluororibose adenine
  modified_base 9: mod_base = OTHER; note = 2-fluororibose adenine
  modified_base 10: mod_base = cm
  modified_base 11: mod_base = OTHER; note = 2-fluororibose adenine
  modified_base 12: mod_base = OTHER; note = 2-O-methylribose adenine
  modified_base 13: mod_base = OTHER; note = 2-fluororibose guanine
  modified_base 14: mod_base = OTHER; note = 2-O-methylribose adenine
  modified_base 15: mod_base = OTHER; note = 2-fluororibose adenine
  modified_base 16: mod_base = cm
  modified_base 17: mod_base = OTHER; note = 2-fluororibose adenine
  modified_base 18: mod_base = cm
  modified_base 19: mod_base = OTHER; note = 2-fluororibose adenine
  source 1..19: mol_type = other RNA
gaatatcaacaagaacaca

SEQ ID NO: 371 - RNA, 19 nt, synthetic construct
  misc_feature 1..19: note = Synthetic: WV-38597
  misc_feature 1..19: note = Synthetic: SSR-0103821
  modified_base 1: mod_base = cm
  modified_base 2: mod_base = OTHER; note = 2-O-methylribose adenine
  modified_base 3: mod_base = OTHER; note = 2-fluororibose adenine
  modified_base 4: mod_base = cm
  modified_base 5: mod_base = OTHER; note = 2-fluororibose adenine
  modified_base 6: mod_base = OTHER; note = 2-O-methylribose adenine
  modified_base 7: mod_base = OTHER; note = 2-fluororibose guanine
  modified_base 8: mod_base = OTHER; note = 2-fluororibose adenine
  modified_base 9: mod_base = OTHER; note = 2-fluororibose adenine
  modified_base 10: mod_base = cm
  modified_base 11: mod_base = OTHER; note = 2-fluororibose adenine
  modified_base 12: mod_base = cm
  modified_base 13: mod_base = OTHER; note = 2-fluororibose adenine
  modified_base 14: mod_base = gm
  modified_base 15: mod_base = OTHER; note = 2-fluororibose adenine
  modified_base 16: mod_base = OTHER; note = 2-O-methylribose adenine
  modified_base 17: mod_base = OTHER; note = 2-fluororibose uracil
  modified_base 18: mod_base = gm
  modified_base 19: mod_base = OTHER; note = 2-fluororibose adenine
  source 1..19: mol_type = other RNA
caacaagaacacagaatga

SEQ ID NO: 372 - RNA, 19 nt, synthetic construct
  misc_feature 1..19: note = Synthetic: WV-38598
  misc_feature 1..19: note = Synthetic: SSR-0103831
  modified_base 1: mod_base = cm
  modified_base 2: mod_base = OTHER; note = 2-O-methylribose adenine
  modified_base 3: mod_base = OTHER; note = 2-fluororibose guanine
  modified_base 4: mod_base = OTHER; note = 2-O-methylribose adenine
  modified_base 5: mod_base = OTHER; note = 2-fluororibose adenine
  modified_base 6: mod_base = um
  modified_base 7: mod_base = OTHER; note = 2-fluororibose guanine
  modified_base 8: mod_base = OTHER; note = 2-fluororibose adenine
  modified_base 9: mod_base = OTHER; note = 2-fluororibose guanine
  modified_base 10: mod_base = um
  modified_base 11: mod_base = OTHER; note = 2-fluororibose guanine
  modified_base 12: mod_base = cm
  modified_base 13: mod_base = OTHER; note = 2-fluororibose adenine
  modified_base 14: mod_base = cm
  modified_base 15: mod_base = OTHER; note = 2-fluororibose adenine
  modified_base 16: mod_base = gm
  modified_base 17: mod_base = OTHER; note = 2-fluororibose cytosine
  modified_base 18: mod_base = um
  modified_base 19: mod_base = OTHER; note = 2-fluororibose adenine
  source 1..19: mol_type = other RNA
cagaatgagtgcacagcta

SEQ ID NO: 373 - RNA, 19 nt, synthetic construct
  misc_feature 1..19: note = Synthetic: WV-38599
  misc_feature 1..19: note = Synthetic: SSR-0103796
  modified_base 1: mod_base = OTHER; note = 2-O-methylribose adenine
  modified_base 2: mod_base = gm
  modified_base 3: mod_base = OTHER; note = 2-fluororibose adenine
  modified_base 4: mod_base = OTHER; note = 2-O-methylribose adenine
  modified_base 5: mod_base = OTHER; note = 2-fluororibose uracil
  modified_base 6: mod_base = gm
  modified_base 7: mod_base = OTHER; note = 2-fluororibose adenine
  modified_base 8: mod_base = OTHER; note = 2-fluororibose guanine
  modified_base 9: mod_base = OTHER; note = 2-fluororibose uracil
  modified_base 10: mod_base = gm
  modified_base 11: mod_base = OTHER; note = 2-fluororibose cytosine
  modified_base 12: mod_base = OTHER; note = 2-O-methylribose adenine
  modified_base 13: mod_base = OTHER; note = 2-fluororibose cytosine
  modified_base 14: mod_base = OTHER; note = 2-O-methylribose adenine
  modified_base 15: mod_base = OTHER; note = 2-fluororibose guanine
  modified_base 16: mod_base = cm
  modified_base 17: mod_base = OTHER; note = 2-fluororibose uracil
  modified_base 18: mod_base = OTHER; note = 2-O-methylribose adenine
  modified_base 19: mod_base = OTHER; note = 2-fluororibose adenine
  source 1..19: mol_type = other RNA
agaatgagtgcacagctaa

SEQ ID NO: 374 - RNA, 19 nt, synthetic construct
  misc_feature 1..19: note = Synthetic: WV-38600
  misc_feature 1..19: note = Synthetic: SSR-0103840
  modified_base 1: mod_base = cm
  modified_base 2: mod_base = OTHER; note = 2-O-methylribose adenine
  modified_base 3: mod_base = OTHER; note = 2-fluororibose uracil
  modified_base 4: mod_base = um
  modified_base 5: mod_base = OTHER; note = 2-fluororibose uracil
  modified_base 6: mod_base = gm
  modified_base 7: mod_base = OTHER; note = 2-fluororibose adenine
  modified_base 8: mod_base = OTHER; note = 2-fluororibose adenine
  modified_base 9: mod_base = OTHER; note = 2-fluororibose adenine
  modified_base 10: mod_base = gm
  modified_base 11: mod_base = OTHER; note = 2-fluororibose adenine
  modified_base 12: mod_base = um
  modified_base 13: mod_base = OTHER; note = 2-fluororibose uracil
  modified_base 14: mod_base = um
  modified_base 15: mod_base = OTHER; note = 2-fluororibose cytosine
  modified_base 16: mod_base = cm
  modified_base 17: mod_base = OTHER; note = 2-fluororibose cytosine
  modified_base 18: mod_base = um
  modified_base 19: mod_base = OTHER; note = 2-fluororibose adenine
  source 1..19: mol_type = other RNA
catttgaaagatttcccta

SEQ ID NO: 375 - RNA, 19 nt, synthetic construct
  misc_feature 1..19: note = Synthetic: WV-38601
  misc_feature 1..19: note = Synthetic: SSR-0103842
  modified_base 1: mod_base = cm
  modified_base 2: mod_base = cm
  modified_base 3: mod_base = OTHER; note = 2-fluororibose adenine
  modified_base 4: mod_base = OTHER; note = 2-O-methylribose adenine
  modified_base 5: mod_base = OTHER; note = 2-fluororibose adenine
  modified_base 6: mod_base = OTHER; note = 2-O-methylribose adenine
  modified_base 7: mod_base = OTHER; note = 2-fluororibose cytosine
  modified_base 8: mod_base = OTHER; note = 2-fluororibose guanine
  modified_base 9: mod_base = OTHER; note = 2-fluororibose guanine
  modified_base 10: mod_base = um
  modified_base 11: mod_base = OTHER; note = 2-fluororibose guanine
  modified_base 12: mod_base = cm
  modified_base 13: mod_base = OTHER; note = 2-fluororibose adenine
  modified_base 14: mod_base = OTHER; note = 2-O-methylribose adenine
  modified_base 15: mod_base = OTHER; note = 2-fluororibose cytosine
  modified_base 16: mod_base = um
  modified_base 17: mod_base = OTHER; note = 2-fluororibose cytosine
  modified_base 18: mod_base = um
  modified_base 19: mod_base = OTHER; note = 2-fluororibose adenine
  source 1..19: mol_type = other RNA
ccaaaacggtgcaactcta

SEQ ID NO: 376 - RNA, 19 nt, synthetic construct
  misc_feature 1..19: note = Synthetic: WV-38602
  misc_feature 1..19: note = Synthetic: SSR-0103933
  modified_base 1: mod_base = gm
  modified_base 2: mod_base = gm
  modified_base 3: mod_base = OTHER; note = 2-fluororibose uracil
  modified_base 4: mod_base = gm
  modified_base 5: mod_base = OTHER; note = 2-fluororibose cytosine
  modified_base 6: mod_base = OTHER; note = 2-O-methylribose adenine
  modified_base 7: mod_base = OTHER; note = 2-fluororibose adenine
  modified_base 8: mod_base = OTHER; note = 2-fluororibose cytosine
  modified_base 9: mod_base = OTHER; note = 2-fluororibose uracil
  modified_base 10: mod_base = cm
  modified_base 11: mod_base = OTHER; note = 2-fluororibose uracil
  modified_base 12: mod_base = OTHER; note = 2-O-methylribose adenine
  modified_base 13: mod_base = OTHER; note = 2-fluororibose uracil
  modified_base 14: mod_base = um
  modified_base 15: mod_base = OTHER; note = 2-fluororibose cytosine
  modified_base 16: mod_base = um
  modified_base 17: mod_base = OTHER; note = 2-fluororibose guanine
  modified_base 18: mod_base = gm
  modified_base 19: mod_base = OTHER; note = 2-fluororibose adenine
  source 1..19: mol_type = other RNA
ggtgcaactctattctgga

SEQ ID NO: 377 - RNA, 19 nt, synthetic construct
  misc_feature 1..19: note = Synthetic: WV-38603
  misc_feature 1..19: note = Synthetic: SSR-0103904
  modified_base 1: mod_base = gm
  modified_base 2: mod_base = cm
  modified_base 3: mod_base = OTHER; note = 2-fluororibose adenine
  modified_base 4: mod_base = OTHER; note = 2-O-methylribose adenine
  modified_base 5: mod_base = OTHER; note = 2-fluororibose cytosine
  modified_base 6: mod_base = um
  modified_base 7: mod_base = OTHER; note = 2-fluororibose cytosine
  modified_base 8: mod_base = OTHER; note = 2-fluororibose uracil
  modified_base 9: mod_base = OTHER; note = 2-fluororibose adenine
  modified_base 10: mod_base = um
  modified_base 11: mod_base = OTHER; note = 2-fluororibose uracil
  modified_base 12: mod_base = cm
  modified_base 13: mod_base = OTHER; note = 2-fluororibose uracil
  modified_base 14: mod_base = gm
  modified_base 15: mod_base = OTHER; note = 2-fluororibose guanine
  modified_base 16: mod_base = OTHER; note = 2-O-methylribose adenine
  modified_base 17: mod_base = OTHER; note = 2-fluororibose cytosine
  modified_base 18: mod_base = um
  modified_base 19: mod_base = OTHER; note = 2-fluororibose adenine
  source 1..19: mol_type = other RNA
gcaactctattctggacta

SEQ ID NO: 378 - RNA, 19 nt, synthetic construct
  misc_feature 1..19: note = Synthetic: WV-38604
  misc_feature 1..19: note = Synthetic: SSR-0103797
  modified_base 1: mod_base = OTHER; note = 2-O-methylribose adenine
  modified_base 2: mod_base = gm
  modified_base 3: mod_base = OTHER; note = 2-fluororibose adenine
  modified_base 4: mod_base = cm
  modified_base 5: mod_base = OTHER; note = 2-fluororibose adenine
  modified_base 6: mod_base = OTHER; note = 2-O-methylribose adenine
  modified_base 7: mod_base = OTHER; note = 2-fluororibose uracil
  modified_base 8: mod_base = OTHER; note = 2-fluororibose uracil
  modified_base 9: mod_base = OTHER; note = 2-fluororibose uracil
  modified_base 10: mod_base = um
  modified_base 11: mod_base = OTHER; note = 2-fluororibose adenine
  modified_base 12: mod_base = gm
  modified_base 13: mod_base = OTHER; note = 2-fluororibose guanine
  modified_base 14: mod_base = cm
  modified_base 15: mod_base = OTHER; note = 2-fluororibose uracil
  modified_base 16: mod_base = cm
  modified_base 17: mod_base = OTHER; note = 2-fluororibose adenine
  modified_base 18: mod_base = OTHER; note = 2-O-methylribose adenine
  modified_base 19: mod_base = OTHER; note = 2-fluororibose adenine
  source 1..19: mol_type = other RNA
agacaattttaggctcaaa

SEQ ID NO: 379 - RNA, 19 nt, synthetic construct
  misc_feature 1..19: note = Synthetic: WV-38605
  misc_feature 1..19: note = Synthetic: SSR-0103888
  modified_base 1: mod_base = gm
  modified_base 2: mod_base = OTHER; note = 2-O-methylribose adenine
  modified_base 3: mod_base = OTHER; note = 2-fluororibose cytosine
  modified_base 4: mod_base = OTHER; note = 2-O-methylribose adenine
  modified_base 5: mod_base = OTHER; note = 2-fluororibose adenine
  modified_base 6: mod_base = um
  modified_base 7: mod_base = OTHER; note = 2-fluororibose uracil
  modified_base 8: mod_base = OTHER; note = 2-fluororibose uracil
  modified_base 9: mod_base = OTHER; note = 2-fluororibose uracil
  modified_base 10: mod_base = OTHER; note = 2-O-methylribose adenine
  modified_base 11: mod_base = OTHER; note = 2-fluororibose guanine
  modified_base 12: mod_base = gm
  modified_base 13: mod_base = OTHER; note = 2-fluororibose cytosine
  modified_base 14: mod_base = um
  modified_base 15: mod_base = OTHER; note = 2-fluororibose cytosine
  modified_base 16: mod_base = OTHER; note = 2-O-methylribose adenine
  modified_base 17: mod_base = OTHER; note = 2-fluororibose adenine
  modified_base 18: mod_base = OTHER; note = 2-O-methylribose adenine
  modified_base 19: mod_base = OTHER; note = 2-fluororibose adenine
  source 1..19: mol_type = other RNA
gacaattttaggctcaaaa

SEQ ID NO: 380 - RNA, 19 nt, synthetic construct
  misc_feature 1..19: note = Synthetic: WV-38606
  misc_feature 1..19: note = Synthetic: SSR-0103925
  modified_base 1: mod_base = gm
  modified_base 2: mod_base = gm
  modified_base 3: mod_base = OTHER; note = 2-fluororibose cytosine
  modified_base 4: mod_base = um
  modified_base 5: mod_base = OTHER; note = 2-fluororibose cytosine
  modified_base 6: mod_base = OTHER; note = 2-O-methylribose adenine
  modified_base 7: mod_base = OTHER; note = 2-fluororibose adenine
  modified_base 8: mod_base = OTHER; note = 2-fluororibose adenine
  modified_base 9: mod_base = OTHER; note = 2-fluororibose adenine
  modified_base 10: mod_base = OTHER; note = 2-O-methylribose adenine
  modified_base 11: mod_base = OTHER; note = 2-fluororibose uracil
  modified_base 12: mod_base = um
  modified_base 13: mod_base = OTHER; note = 2-fluororibose adenine
  modified_base 14: mod_base = OTHER; note = 2-O-methylribose adenine
  modified_base 15: mod_base = OTHER; note = 2-fluororibose adenine
  modified_base 16: mod_base = gm
  modified_base 17: mod_base = OTHER; note = 2-fluororibose cytosine
  modified_base 18: mod_base = um
  modified_base 19: mod_base = OTHER; note = 2-fluororibose adenine
  source 1..19: mol_type = other RNA
ggctcaaaaattaaagcta

SEQ ID NO: 381 - RNA, 19 nt, synthetic construct
  misc_feature 1..19: note = Synthetic: WV-38607
  misc_feature 1..19: note = Synthetic: SSR-0103909
  modified_base 1: mod_base = gm
  modified_base 2: mod_base = cm
  modified_base 3: mod_base = OTHER; note = 2-fluororibose uracil
  modified_base 4: mod_base = cm
  modified_base 5: mod_base = OTHER; note = 2-fluororibose adenine
  modified_base 6: mod_base = OTHER; note = 2-O-methylribose adenine
  modified_base 7: mod_base = OTHER; note = 2-fluororibose adenine
  modified_base 8: mod_base = OTHER; note = 2-fluororibose adenine
  modified_base 9: mod_base = OTHER; note = 2-fluororibose adenine
  modified_base 10: mod_base = um
  modified_base 11: mod_base = OTHER; note = 2-fluororibose uracil
  modified_base 12: mod_base = OTHER; note = 2-O-methylribose adenine
  modified_base 13: mod_base = OTHER; note = 2-fluororibose adenine
  modified_base 14: mod_base = OTHER; note = 2-O-methylribose adenine
  modified_base 15: mod_base = OTHER; note = 2-fluororibose guanine
  modified_base 16: mod_base = cm
  modified_base 17: mod_base = OTHER; note = 2-fluororibose uracil
  modified_base 18: mod_base = OTHER; note = 2-O-methylribose adenine
  modified_base 19: mod_base = OTHER; note = 2-fluororibose adenine
  source 1..19: mol_type = other RNA
gctcaaaaattaaagctaa

SEQ ID NO: 382 - RNA, 19 nt, synthetic construct
  misc_feature 1..19: note = Synthetic: WV-38608
  misc_feature 1..19: note = Synthetic: SSR-0103908
  modified_base 1: mod_base = gm
  modified_base 2: mod_base = cm
  modified_base 3: mod_base = OTHER; note = 2-fluororibose uracil
  modified_base 4: mod_base = OTHER; note = 2-O-methylribose adenine
  modified_base 5: mod_base = OTHER; note = 2-fluororibose adenine
  modified_base 6: mod_base = cm
  modified_base 7: mod_base = OTHER; note = 2-fluororibose adenine
  modified_base 8: mod_base = OTHER; note = 2-fluororibose cytosine
  modified_base 9: mod_base = OTHER; note = 2-fluororibose adenine
  modified_base 10: mod_base = gm
  modified_base 11: mod_base = OTHER; note = 2-fluororibose guanine
  modified_base 12: mod_base = OTHER; note = 2-O-methylribose adenine
  modified_base 13: mod_base = OTHER; note = 2-fluororibose adenine
  modified_base 14: mod_base = OTHER; note = 2-O-methylribose adenine
  modified_base 15: mod_base = OTHER; note = 2-fluororibose adenine
  modified_base 16: mod_base = gm
  modified_base 17: mod_base = OTHER; note = 2-fluororibose guanine
  modified_base 18: mod_base = OTHER; note = 2-O-methylribose adenine
  modified_base 19: mod_base = OTHER; note = 2-fluororibose adenine
  source 1..19: mol_type = other RNA
gctaacacaggaaaaggaa

SEQ ID NO: 383 - RNA, 19 nt, synthetic construct
  misc_feature 1..19: note = Synthetic: WV-38609
  misc_feature 1..19: note = Synthetic: SSR-0103913
  modified_base 1: mod_base = gm
  modified_base 2: mod_base = gm
  modified_base 3: mod_base = OTHER; note = 2-fluororibose adenine
  modified_base 4: mod_base = OTHER; note = 2-O-methylribose adenine
  modified_base 5: mod_base = OTHER; note = 2-fluororibose cytosine
  modified_base 6: mod_base = um
  modified_base 7: mod_base = OTHER; note = 2-fluororibose guanine
  modified_base 8: mod_base = OTHER; note = 2-fluororibose uracil
  modified_base 9: mod_base = OTHER; note = 2-fluororibose adenine
  modified_base 10: mod_base = cm
  modified_base 11: mod_base = OTHER; note = 2-fluororibose uracil
  modified_base 12: mod_base = gm
  modified_base 13: mod_base = OTHER; note = 2-fluororibose guanine
  modified_base 14: mod_base = cm
  modified_base 15: mod_base = OTHER; note = 2-fluororibose uracil
  modified_base 16: mod_base = OTHER; note = 2-O-methylribose adenine
  modified_base 17: mod_base = OTHER; note = 2-fluororibose uracil
  modified_base 18: mod_base = um
  modified_base 19: mod_base = OTHER; note = 2-fluororibose adenine
  source 1..19: mol_type = other RNA
ggaactgtactggctatta

SEQ ID NO: 384 - RNA, 19 nt, synthetic construct
  misc_feature 1..19: note = Synthetic: WV-38610
  misc_feature 1..19: note = Synthetic: SSR-0103850
  modified_base 1: mod_base = cm
  modified_base 2: mod_base = cm
  modified_base 3: mod_base = OTHER; note = 2-fluororibose cytosine
  modified_base 4: mod_base = OTHER; note = 2-O-methylribose adenine
  modified_base 5: mod_base = OTHER; note = 2-fluororibose cytosine
  modified_base 6: mod_base = um
  modified_base 7: mod_base = OTHER; note = 2-fluororibose adenine
  modified_base 8: mod_base = OTHER; note = 2-fluororibose cytosine
  modified_base 9: mod_base = OTHER; note = 2-fluororibose adenine
  modified_base 10: mod_base = um
  modified_base 11: mod_base = OTHER; note = 2-fluororibose cytosine
  modified_base 12: mod_base = OTHER; note = 2-O-methylribose adenine
  modified_base 13: mod_base = OTHER; note = 2-fluororibose adenine
  modified_base 14: mod_base = gm
  modified_base 15: mod_base = OTHER; note = 2-fluororibose adenine
  modified_base 16: mod_base = cm
  modified_base 17: mod_base = OTHER; note = 2-fluororibose uracil
  modified_base 18: mod_base = OTHER; note = 2-O-methylribose adenine
  modified_base 19: mod_base = OTHER; note = 2-fluororibose adenine
  source 1..19: mol_type = other RNA
cccactacatcaagactaa

SEQ ID NO: 385 - RNA, 19 nt, synthetic construct
  misc_feature 1..19: note = Synthetic: WV-41031
  misc_feature 1..19: note = Synthetic: SSR-0101525
  modified_base 1: mod_base = OTHER; note = triantennary GalNAc with C12 linker linked to 6-aminohexanol linked by phosphate to the 5' end of 2-O-methylribose guanine
  modified_base 1..2: mod_base = OTHER; note = phosphorothioate
  modified_base 2: mod_base = gm
  modified_base 3: mod_base = OTHER; note = 2-fluororibose cytosine
  modified_base 4: mod_base = um
  modified_base 5: mod_base = OTHER; note = 2-fluororibose uracil
  modified_base 6: mod_base = um
  modified_base 7: mod_base = OTHER; note = 2-fluororibose cytosine
  modified_base 8: mod_base = OTHER; note = 2-fluororibose adenine
  modified_base 9: mod_base = OTHER; note = 2-fluororibose cytosine
  modified_base 10: mod_base = OTHER; note = 2-O-methylribose adenine
  modified_base 11: mod_base = OTHER; note = 2-fluororibose guanine
  modified_base 12: mod_base = OTHER; note = 2-O-methylribose adenine
  modified_base 13: mod_base = OTHER; note = 2-fluororibose guanine
  modified_base 14: mod_base = gm
  modified_base 15: mod_base = OTHER; note = 2-fluororibose uracil
  modified_base 16: mod_base = cm
  modified_base 17: mod_base = OTHER; note = 2-fluororibose uracil
  modified_base 18: mod_base = gm
  modified_base 18..19: mod_base = OTHER; note = phosphorothioate
  modified_base 19: mod_base = OTHER; note = 2-fluororibose adenine
  source 1..19: mol_type = other RNA
ggctttcacagaggtctga

SEQ ID NO: 386 - RNA, 19 nt, synthetic construct
  misc_feature 1..19: note = Synthetic: WV-41032
  misc_feature 1..19: note = Synthetic: SSR-0101526
  modified_base 1: mod_base = OTHER; note = triantennary GalNAc with C12 linker linked to 6-aminohexanol linked by phosphate to the 5' end of 2-O-methylribose cytosine
  modified_base 1..2: mod_base = OTHER; note = phosphorothioate
  modified_base 2: mod_base = gm
  modified_base 3: mod_base = OTHER; note = 2-fluororibose cytosine
  modified_base 4: mod_base = um
  modified_base 5: mod_base = OTHER; note = 2-fluororibose guanine
  modified_base 6: mod_base = um
  modified_base 7: mod_base = OTHER; note = 2-fluororibose uracil
  modified_base 8: mod_base = OTHER; note = 2-fluororibose guanine
  modified_base 9: mod_base = OTHER; note = 2-fluororibose guanine
  modified_base 10: mod_base = cm
  modified_base 11: mod_base = OTHER; note = 2-fluororibose uracil
  modified_base 12: mod_base = um
  modified_base 13: mod_base = OTHER; note = 2-fluororibose uracil
  modified_base 14: mod_base = cm
  modified_base 15: mod_base = OTHER; note = 2-fluororibose adenine
  modified_base 16: mod_base = cm
  modified_base 17: mod_base = OTHER; note = 2-fluororibose adenine
  modified_base 18: mod_base = gm
  modified_base 18..19: mod_base = OTHER; note = phosphorothioate
  modified_base 19: mod_base = OTHER; note = 2-fluororibose adenine
  source 1..19: mol_type = other RNA
cgctgttggctttcacaga

SEQ ID NO: 387 - RNA, 19 nt, synthetic construct
  misc_feature 1..19: note = Synthetic: WV-41033
  misc_feature 1..19: note = Synthetic: SSR-0101527
  modified_base 1: mod_base = OTHER; note = triantennary GalNAc with C12 linker linked to 6-aminohexanol linked by phosphate to the 5' end of 2-O-methylribose cytosine
  modified_base 1..2: mod_base = OTHER; note = phosphorothioate
  modified_base 2: mod_base = um
  modified_base 3: mod_base = OTHER; note = 2-fluororibose uracil
  modified_base 4: mod_base = um
  modified_base 5: mod_base = OTHER; note = 2-fluororibose cytosine
  modified_base 6: mod_base = OTHER; note = 2-O-methylribose adenine
  modified_base 7: mod_base = OTHER; note = 2-fluororibose cytosine
  modified_base 8: mod_base = OTHER; note = 2-fluororibose adenine
  modified_base 9: mod_base = OTHER; note = 2-fluororibose guanine
  modified_base 10: mod_base = OTHER; note = 2-O-methylribose adenine
  modified_base 11: mod_base = OTHER; note = 2-fluororibose guanine
  modified_base 12: mod_base = gm
  modified_base 13: mod_base = OTHER; note = 2-fluororibose uracil
  modified_base 14: mod_base = cm
  modified_base 15: mod_base = OTHER; note = 2-fluororibose uracil
  modified_base 16: mod_base = gm
  modified_base 17: mod_base = OTHER; note = 2-fluororibose adenine
  modified_base 18: mod_base = cm
  modified_base 18..19: mod_base = OTHER; note = phosphorothioate
  modified_base 19: mod_base = OTHER; note = 2-fluororibose adenine
  source 1..19: mol_type = other RNA
ctttcacagaggtctgaca

SEQ ID NO: 388 - RNA, 19 nt, synthetic construct
  misc_feature 1..19: note = Synthetic: WV-41034
  misc_feature 1..19: note = Synthetic: SSR-0101528
  modified_base 1: mod_base = OTHER; note = triantennary GalNAc with C12 linker linked to 6-aminohexanol linked by phosphate to the 5' end of 2-O-methylribose guanine
  modified_base 1..2: mod_base = OTHER; note = phosphorothioate
  modified_base 2: mod_base = gm
  modified_base 3: mod_base = OTHER; note = 2-fluororibose guanine
  modified_base 4: mod_base = OTHER; note = 2-O-methylribose adenine
  modified_base 5: mod_base = OTHER; note = 2-fluororibose adenine
  modified_base 6: mod_base = OTHER; note = 2-O-methylribose adenine
  modified_base 7: mod_base = OTHER; note = 2-fluororibose adenine
  modified_base 8: mod_base = OTHER; note = 2-fluororibose adenine
  modified_base 9: mod_base = OTHER; note = 2-fluororibose cytosine
  modified_base 10: mod_base = um
  modified_base 11: mod_base = OTHER; note = 2-fluororibose guanine
  modified_base 12: mod_base = gm
  modified_base 13: mod_base = OTHER; note = 2-fluororibose uracil
  modified_base 14: mod_base = OTHER; note = 2-O-methylribose adenine
  modified_base 15: mod_base = OTHER; note = 2-fluororibose uracil
  modified_base 16: mod_base = cm
  modified_base 17: mod_base = OTHER; note = 2-fluororibose adenine
  modified_base 18: mod_base = OTHER; note = 2-O-methylribose adenine
  modified_base 18..19: mod_base = OTHER; note = phosphorothioate
  modified_base 19: mod_base = OTHER; note = 2-fluororibose adenine
  source 1..19: mol_type = other RNA
gggaaaaactggtatcaaa

SEQ ID NO: 389 - RNA, 19 nt, synthetic construct
  misc_feature 1..19: note = Synthetic: WV-41035
  misc_feature 1..19: note = Synthetic: SSR-0101529
  modified_base 1: mod_base = OTHER; note = triantennary GalNAc with C12 linker linked to 6-aminohexanol linked by phosphate to the 5' end of 2-O-methylribose adenine
  modified_base 1..2: mod_base = OTHER; note = phosphorothioate
  modified_base 2: mod_base = OTHER; note = 2-O-methylribose adenine
  modified_base 3: mod_base = OTHER; note = 2-fluororibose guanine
  modified_base 4: mod_base = um
  modified_base 5: mod_base = OTHER; note = 2-fluororibose cytosine
  modified_base 6: mod_base = um
  modified_base 7: mod_base = OTHER; note = 2-fluororibose guanine
  modified_base 8: mod_base = OTHER; note = 2-fluororibose adenine
  modified_base 9: mod_base = OTHER; note = 2-fluororibose uracil
  modified_base 10: mod_base = OTHER; note = 2-O-methylribose adenine
  modified_base 11: mod_base = OTHER; note = 2-fluororibose guanine
  modified_base 12: mod_base = OTHER; note = 2-O-methylribose adenine
  modified_base 13: mod_base = OTHER; note = 2-fluororibose uracil
  modified_base 14: mod_base = gm
  modified_base 15: mod_base = OTHER; note = 2-fluororibose guanine
  modified_base 16: mod_base = OTHER; note = 2-O-methylribose adenine
  modified_base 17: mod_base = OTHER; note = 2-fluororibose adenine
  modified_base 18: mod_base = um
  modified_base 18..19: mod_base = OTHER; note = phosphorothioate
  modified_base 19: mod_base = OTHER; note = 2-fluororibose adenine
  source 1..19: mol_type = other RNA
aagtctgatagatggaata

SEQ ID NO: 390 - RNA, 19 nt, synthetic construct
  misc_feature 1..19: note = Synthetic: WV-41036
  misc_feature 1..19: note = Synthetic: SSR-0101530
  modified_base 1: mod_base = OTHER; note = triantennary GalNAc with C12 linker linked to 6-aminohexanol linked by phosphate to the 5' end of 2-O-methylribose guanine
  modified_base 1..2: mod_base = OTHER; note = phosphorothioate
  modified_base 2: mod_base = gm
  modified_base 3: mod_base = OTHER; note = 2-fluororibose adenine
  modified_base 4: mod_base = OTHER; note = 2-O-methylribose adenine
  modified_base 5: mod_base = OTHER; note = 2-fluororibose adenine
  modified_base 6: mod_base = OTHER; note = 2-O-methylribose adenine
  modified_base 7: mod_base = OTHER; note = 2-fluororibose adenine
  modified_base 8: mod_base = OTHER; note = 2-fluororibose cytosine
  modified_base 9: mod_base = OTHER; note = 2-fluororibose uracil
  modified_base 10: mod_base = gm
  modified_base 11: mod_base = OTHER; note = 2-fluororibose guanine
  modified_base 12: mod_base = um
  modified_base 13: mod_base = OTHER; note = 2-fluororibose adenine
  modified_base 14: mod_base = um
  modified_base 15: mod_base = OTHER; note = 2-fluororibose cytosine
  modified_base 16: mod_base = OTHER; note = 2-O-methylribose adenine
  modified_base 17: mod_base = OTHER; note = 2-fluororibose adenine
  modified_base 18: mod_base = OTHER; note = 2-O-methylribose adenine
  modified_base 18..19: mod_base = OTHER; note = phosphorothioate
  modified_base 19: mod_base = OTHER; note = 2-fluororibose adenine
  source 1..19: mol_type = other RNA
ggaaaaactggtatcaaaa

SEQ ID NO: 391 - RNA, 19 nt, synthetic construct
  misc_feature 1..19: note = Synthetic: WV-41037
  misc_feature 1..19: note = Synthetic: SSR-0101531
  modified_base 1: mod_base = OTHER; note = triantennary GalNAc with C12 linker linked to 6-aminohexanol linked by phosphate to the 5' end of 2-O-methylribose cytosine
  modified_base 1..2: mod_base = OTHER; note = phosphorothioate
  modified_base 2: mod_base = OTHER; note = 2-O-methylribose adenine
  modified_base 3: mod_base = OTHER; note = 2-fluororibose adenine
  modified_base 4: mod_base = gm
  modified_base 5: mod_base = OTHER; note = 2-fluororibose adenine
  modified_base 6: mod_base = um
  modified_base 7: mod_base = OTHER; note = 2-fluororibose uracil
  modified_base 8: mod_base = OTHER; note = 2-fluororibose adenine
  modified_base 9: mod_base = OTHER; note = 2-fluororibose uracil
  modified_base 10: mod_base = gm
  modified_base 11: mod_base = OTHER; note = 2-fluororibose guanine
  modified_base 12: mod_base = cm
  modified_base 13: mod_base = OTHER; note = 2-fluororibose cytosine
  modified_base 14: mod_base = um
  modified_base 15: mod_base = OTHER; note = 2-fluororibose guanine
  modified_base 16: mod_base = um
  modified_base 17: mod_base = OTHER; note = 2-fluororibose adenine
  modified_base 18: mod_base = um
  modified_base 18..19: mod_base = OTHER; note = phosphorothioate
  modified_base 19: mod_base = OTHER; note = 2-fluororibose adenine
  source 1..19: mol_type = other RNA
caagattatggcctgtata

SEQ ID NO: 392 - RNA, 19 nt, synthetic construct
  misc_feature 1..19: note = Synthetic: WV-41038
  misc_feature 1..19: note = Synthetic: SSR-0101532
  modified_base 1: mod_base = OTHER; note = triantennary GalNAc with C12 linker linked to 6-aminohexanol linked by phosphate to the 5' end of 2-O-methylribose guanine
  modified_base 1..2: mod_base = OTHER; note = phosphorothioate
  modified_base 2: mod_base = gm
  modified_base 3: mod_base = OTHER; note = 2-fluororibose adenine
  modified_base 4: mod_base = um
  modified_base 5: mod_base = OTHER; note = 2-fluororibose cytosine
  modified_base 6: mod_base = OTHER; note = 2-O-methylribose adenine
  modified_base 7: mod_base = OTHER; note = 2-fluororibose cytosine
  modified_base 8: mod_base = OTHER; note = 2-fluororibose adenine
  modified_base 9: mod_base = OTHER; note = 2-fluororibose adenine
  modified_base 10: mod_base = OTHER; note = 2-O-methylribose adenine
  modified_base 11: mod_base = OTHER; note = 2-fluororibose adenine
  modified_base 12: mod_base = gm
  modified_base 13: mod_base = OTHER; note = 2-fluororibose cytosine
  modified_base 14: mod_base = OTHER; note = 2-O-methylribose adenine
  modified_base 15: mod_base = OTHER; note = 2-fluororibose cytosine
  modified_base 16: mod_base = um
  modified_base 17: mod_base = OTHER; note = 2-fluororibose uracil
  modified_base 18: mod_base = cm
  modified_base 18..19: mod_base = OTHER; note = phosphorothioate
  modified_base 19: mod_base = OTHER; note = 2-fluororibose adenine
  source 1..19: mol_type = other RNA
ggatcacaaaagcacttca

SEQ ID NO: 393 - RNA, 19 nt, synthetic construct
  misc_feature 1..19: note = Synthetic: WV-41039
  misc_feature 1..19: note = Synthetic: SSR-0101533
  modified_base 1: mod_base = OTHER; note = triantennary GalNAc with C12 linker linked to 6-aminohexanol linked by phosphate to the 5' end of 2-O-methylribose cytosine
  modified_base 1..2: mod_base = OTHER; note = phosphorothioate
  modified_base 2: mod_base = OTHER; note = 2-O-methylribose adenine
  modified_base 3: mod_base = OTHER; note = 2-fluororibose adenine
  modified_base 4: mod_base = um
  modified_base 5: mod_base = OTHER; note = 2-fluororibose adenine
  modified_base 6: mod_base = OTHER; note = 2-O-methylribose adenine
  modified_base 7: mod_base = OTHER; note = 2-fluororibose guanine
  modified_base 8: mod_base = OTHER; note = 2-fluororibose adenine
  modified_base 9: mod_base = OTHER; note = 2-fluororibose adenine
  modified_base 10: mod_base = OTHER; note = 2-O-methylribose adenine
  modified_base 11: mod_base = OTHER; note = 2-fluororibose adenine
  modified_base 12: mod_base = um
  modified_base 13: mod_base = OTHER; note = 2-fluororibose guanine
  modified_base 14: mod_base = OTHER; note = 2-O-methylribose adenine
  modified_base 15: mod_base = OTHER; note = 2-fluororibose uracil
  modified_base 16: mod_base = um
  modified_base 17: mod_base = OTHER; note = 2-fluororibose uracil
  modified_base 18: mod_base = um
  modified_base 18..19: mod_base = OTHER; note = phosphorothioate
  modified_base 19: mod_base = OTHER; note = 2-fluororibose adenine
  source 1..19: mol_type = other RNA
caataagaaaatgatttta

SEQ ID NO: 394 - RNA, 19 nt, synthetic construct
  misc_feature 1..19: note = Synthetic: WV-41040
  misc_feature 1..19: note = Synthetic: SSR-0101534
  modified_base 1: mod_base = OTHER; note = triantennary GalNAc with C12 linker linked to 6-aminohexanol linked by phosphate to the 5' end of 2-O-methylribose cytosine
  modified_base 1..2: mod_base = OTHER; note = phosphorothioate
  modified_base 2: mod_base = cm
  modified_base 3: mod_base = OTHER; note = 2-fluororibose adenine
  modified_base 4: mod_base = um
  modified_base 5: mod_base = OTHER; note = 2-fluororibose adenine
  modified_base 6: mod_base = um
  modified_base 7: mod_base = OTHER; note = 2-fluororibose uracil
  modified_base 8: mod_base = OTHER; note = 2-fluororibose guanine
  modified_base 9: mod_base = OTHER; note = 2-fluororibose uracil
  modified_base 10: mod_base = um
  modified_base 11: mod_base = OTHER; note = 2-fluororibose cytosine
  modified_base 12: mod_base = cm
  modified_base 13: mod_base = OTHER; note = 2-fluororibose adenine
  modified_base 14: mod_base = gm
  modified_base 15: mod_base = OTHER; note = 2-fluororibose cytosine
  modified_base 16: mod_base = OTHER; note = 2-O-methylribose adenine
  modified_base 17: mod_base = OTHER; note = 2-fluororibose adenine
  modified_base 18: mod_base = OTHER; note = 2-O-methylribose adenine
  modified_base 18..19: mod_base = OTHER; note = phosphorothioate
  modified_base 19: mod_base = OTHER; note = 2-fluororibose adenine
  source 1..19: mol_type = other RNA
ccatattgttccagcaaaa

SEQ ID NO: 395 - RNA, 19 nt, synthetic construct
  misc_feature 1..19: note = Synthetic: WV-41041
  misc_feature 1..19: note = Synthetic: SSR-0101535
  modified_base 1: mod_base = OTHER; note = triantennary GalNAc with C12 linker linked to 6-aminohexanol linked by phosphate to the 5' end of 2-O-methylribose uracil
  modified_base 1..2: mod_base = OTHER; note = phosphorothioate
  modified_base 2: mod_base = OTHER; note = 2-O-methylribose adenine
  modified_base 3: mod_base = OTHER; note = 2-fluororibose guanine
  modified_base 4: mod_base = OTHER; note = 2-O-methylribose adenine
  modified_base 5: mod_base = OTHER; note = 2-fluororibose uracil
  modified_base 6: mod_base = gm
  modified_base 7: mod_base = OTHER; note = 2-fluororibose guanine
  modified_base 8: mod_base = OTHER; note = 2-fluororibose adenine
  modified_base 9: mod_base = OTHER; note = 2-fluororibose adenine
  modified_base 10: mod_base = um
  modified_base 11: mod_base = OTHER; note = 2-fluororibose adenine
  modified_base 12: mod_base = cm
  modified_base 13: mod_base = OTHER; note = 2-fluororibose uracil
  modified_base 14: mod_base = um
  modified_base 15: mod_base = OTHER; note = 2-fluororibose adenine
  modified_base 16: mod_base = cm
  modified_base 17: mod_base = OTHER; note = 2-fluororibose cytosine
  modified_base 18: mod_base = OTHER; note = 2-O-methylribose adenine
  modified_base 18..19: mod_base = OTHER; note = phosphorothioate
  modified_base 19: mod_base = OTHER; note = 2-fluororibose adenine
  source 1..19: mol_type = other RNA
tagatggaatacttaccaa

SEQ ID NO: 396 - RNA, 19 nt, synthetic construct
  misc_feature 1..19: note = Synthetic: WV-41042
  misc_feature 1..19: note = Synthetic: SSR-0101536
  modified_base 1: mod_base = OTHER; note = triantennary GalNAc with C12 linker linked to 6-aminohexanol linked by phosphate to the 5' end of 2-O-methylribose adenine
  modified_base 1..2: mod_base = OTHER; note = phosphorothioate
  modified_base 2: mod_base = cm
  modified_base 3: mod_base = OTHER; note = 2-fluororibose adenine
  modified_base 4: mod_base = OTHER; note = 2-O-methylribose adenine
  modified_base 5: mod_base = OTHER; note = 2-fluororibose guanine
  modified_base 6: mod_base = OTHER; note = 2-O-methylribose adenine
  modified_base 7: mod_base = OTHER; note = 2-fluororibose uracil
  modified_base 8: mod_base = OTHER; note = 2-fluororibose uracil
  modified_base 9: mod_base = OTHER; note = 2-fluororibose adenine
  modified_base 10: mod_base = um
  modified_base 11: mod_base = OTHER; note = 2-fluororibose guanine
  modified_base 12: mod_base = gm
  modified_base 13: mod_base = OTHER; note = 2-fluororibose cytosine
  modified_base 14: mod_base = cm
  modified_base 15: mod_base = OTHER; note = 2-fluororibose uracil
  modified_base 16: mod_base = gm
  modified_base 17: mod_base = OTHER; note = 2-fluororibose uracil
  modified_base 18: mod_base = OTHER; note = 2-O-methylribose adenine
  modified_base 18..19: mod_base = OTHER; note = phosphorothioate
  modified_base 19: mod_base = OTHER; note = 2-fluororibose adenine
  source 1..19: mol_type = other RNA
acaagattatggcctgtaa

SEQ ID NO: 397 - RNA, 19 nt, synthetic construct
  misc_feature 1..19: note = Synthetic: WV-41043
  misc_feature 1..19: note = Synthetic: SSR-0101537
  modified_base 1: mod_base = OTHER; note = triantennary GalNAc with C12 linker linked to 6-aminohexanol linked by phosphate to the 5' end of 2-O-methylribose cytosine
  modified_base 1..2: mod_base = OTHER; note = phosphorothioate
  modified_base 2: mod_base = cm
  modified_base 3: mod_base = OTHER; note = 2-fluororibose cytosine
  modified_base 4: mod_base = OTHER; note = 2-O-methylribose adenine
  modified_base 5: mod_base = OTHER; note = 2-fluororibose uracil
  modified_base 6: mod_base = OTHER; note = 2-O-methylribose adenine
  modified_base 7: mod_base = OTHER; note = 2-fluororibose uracil
  modified_base 8: mod_base = OTHER; note = 2-fluororibose uracil
  modified_base 9: mod_base = OTHER; note = 2-fluororibose guanine
  modified_base 10: mod_base = um
  modified_base 11: mod_base = OTHER; note = 2-fluororibose uracil
  modified_base 12: mod_base = cm
  modified_base 13: mod_base = OTHER; note = 2-fluororibose cytosine
  modified_base 14: mod_base = OTHER; note = 2-O-methylribose adenine
  modified_base 15: mod_base = OTHER; note = 2-fluororibose guanine
  modified_base 16: mod_base = cm
  modified_base 17: mod_base = OTHER; note = 2-fluororibose adenine
  modified_base 18: mod_base = OTHER; note = 2-O-methylribose adenine
  modified_base 18..19: mod_base = OTHER; note = phosphorothioate
  modified_base 19: mod_base = OTHER; note = 2-fluororibose adenine
  source 1..19: mol_type = other RNA
cccatattgttccagcaaa

SEQ ID NO: 398 - RNA, 19 nt, synthetic construct
  misc_feature 1..19: note = Synthetic: WV-41044
  misc_feature 1..19: note = Synthetic: SSR-0101538
  modified_base 1: mod_base = OTHER; note = triantennary GalNAc with C12 linker linked to 6-aminohexanol linked by phosphate to the 5' end of 2-O-methylribose adenine
  modified_base 1..2: mod_base = OTHER; note = phosphorothioate
  modified_base 2: mod_base = cm
  modified_base 3: mod_base = OTHER; note = 2-fluororibose adenine
  modified_base 4: mod_base = gm
  modified_base 5: mod_base = OTHER; note = 2-fluororibose adenine
  modified_base 6: mod_base = um
  modified_base 7: mod_base = OTHER; note = 2-fluororibose guanine
  modified_base 8: mod_base = OTHER; note = 2-fluororibose adenine
  modified_base 9: mod_base = OTHER; note = 2-fluororibose adenine
  modified_base 10: mod_base = gm
  modified_base 11: mod_base = OTHER; note = 2-fluororibose uracil
  modified_base 12: mod_base = cm
  modified_base 13: mod_base = OTHER; note = 2-fluororibose guanine
  modified_base 14: mod_base = um
  modified_base 15: mod_base = OTHER; note = 2-fluororibose adenine
  modified_base 16: mod_base = OTHER; note = 2-O-methylribose adenine
  modified_base 17: mod_base = OTHER; note = 2-fluororibose guanine
  modified_base 18: mod_base = OTHER; note = 2-O-methylribose adenine
  modified_base 18..19: mod_base = OTHER; note = phosphorothioate
  modified_base 19: mod_base = OTHER; note = 2-fluororibose adenine
  source 1..19: mol_type = other RNA
acagatgaagtcgtaagaa

SEQ ID NO: 399 - RNA, 19 nt, synthetic construct
  misc_feature 1..19: note = Synthetic: WV-41045
  misc_feature 1..19: note = Synthetic: SSR-0101539
  modified_base 1: mod_base = OTHER; note = triantennary GalNAc with C12 linker linked to 6-aminohexanol linked by phosphate to the 5' end of 2-O-methylribose uracil
  modified_base 1..2: mod_base = OTHER; note = phosphorothioate
  modified_base 2: mod_base = gm
  modified_base 3: mod_base = OTHER; note = 2-fluororibose uracil
  modified_base 4: mod_base = OTHER; note = 2-O-methylribose adenine
  modified_base 5: mod_base = OTHER; note = 2-fluororibose uracil
  modified_base 6: mod_base = um
  modified_base 7: mod_base = OTHER; note = 2-fluororibose guanine
  modified_base 8: mod_base = OTHER; note = 2-fluororibose guanine
  modified_base 9: mod_base = OTHER; note = 2-fluororibose adenine
  modified_base 10: mod_base = gm
  modified_base 11: mod_base = OTHER; note = 2-fluororibose adenine
  modified_base 12: mod_base = cm
  modified_base 13: mod_base = OTHER; note = 2-fluororibose adenine
  modified_base 14: mod_base = gm
  modified_base 15: mod_base = OTHER; note = 2-fluororibose adenine
  modified_base 16: mod_base = um
  modified_base 17: mod_base = OTHER; note = 2-fluororibose guanine
  modified_base 18: mod_base = OTHER; note = 2-O-methylribose adenine
  modified_base 18..19: mod_base = OTHER; note = phosphorothioate
  modified_base 19: mod_base = OTHER; note = 2-fluororibose adenine
  source 1..19: mol_type = other RNA
tgtattggagacagatgaa

SEQ ID NO: 400 - RNA, 19 nt, synthetic construct
  misc_feature 1..19: note = Synthetic: WV-41046
  misc_feature 1..19: note = Synthetic: SSR-0101540
  modified_base 1: mod_base = OTHER; note = triantennary GalNAc with C12 linker linked to 6-aminohexanol linked by phosphate to the 5' end of 2-O-methylribose cytosine
  modified_base 1..2: mod_base = OTHER; note = phosphorothioate
  modified_base 2: mod_base = OTHER; note = 2-O-methylribose adenine
  modified_base 3: mod_base = OTHER; note = 2-fluororibose cytosine
  modified_base 4: mod_base = OTHER; note = 2-O-methylribose adenine
  modified_base 5: mod_base = OTHER; note = 2-fluororibose adenine
  modified_base 6: mod_base = gm
  modified_base 7: mod_base = OTHER; note = 2-fluororibose adenine
  modified_base 8: mod_base = OTHER; note = 2-fluororibose uracil
  modified_base 9: mod_base = OTHER; note = 2-fluororibose uracil
  modified_base 10: mod_base = OTHER; note = 2-O-methylribose adenine
  modified_base 11: mod_base = OTHER; note = 2-fluororibose uracil
  modified_base 12: mod_base = gm
  modified_base 13: mod_base = OTHER; note = 2-fluororibose guanine
  modified_base 14: mod_base = cm
  modified_base 15: mod_base = OTHER; note = 2-fluororibose cytosine
  modified_base 16: mod_base = um
  modified_base 17: mod_base = OTHER; note = 2-fluororibose guanine
  modified_base 18: mod_base = um
  modified_base 18..19: mod_base = OTHER; note = phosphorothioate
  modified_base 19: mod_base = OTHER; note = 2-fluororibose adenine
  source 1..19: mol_type = other RNA
cacaagattatggcctgta

SEQ ID NO: 401 - RNA, 19 nt, synthetic construct
  misc_feature 1..19: note = Synthetic: WV-41047
  misc_feature 1..19: note = Synthetic: SSR-0101541
  modified_base 1: mod_base = OTHER; note = triantennary GalNAc with C12 linker linked to 6-aminohexanol linked by phosphate to the 5' end of 2-O-methylribose guanine
  modified_base 1..2: mod_base = OTHER; note = phosphorothioate
  modified_base 2: mod_base = OTHER; note = 2-O-methylribose adenine
  modified_base 3: mod_base = OTHER; note = 2-fluororibose adenine
  modified_base 4: mod_base = gm
  modified_base 5: mod_base = OTHER; note = 2-fluororibose uracil
  modified_base 6: mod_base = cm
  modified_base 7: mod_base = OTHER; note = 2-fluororibose guanine
  modified_base 8: mod_base = OTHER; note = 2-fluororibose uracil
  modified_base 9: mod_base = OTHER; note = 2-fluororibose adenine
  modified_base 10: mod_base = OTHER; note = 2-O-methylribose adenine
  modified_base 11: mod_base = OTHER; note = 2-fluororibose guanine
  modified_base 12: mod_base = OTHER; note = 2-O-methylribose adenine
  modified_base 13: mod_base = OTHER; note = 2-fluororibose adenine
  modified_base 14: mod_base = gm
  modified_base 15: mod_base = OTHER; note = 2-fluororibose uracil
  modified_base 16: mod_base = cm
  modified_base 17: mod_base = OTHER; note = 2-fluororibose uracil
  modified_base 18: mod_base = gm
  modified_base 18..19: mod_base = OTHER; note = phosphorothioate
  modified_base 19: mod_base = OTHER; note = 2-fluororibose adenine
  source 1..19: mol_type = other RNA
gaagtcgtaagaagtctga

SEQ ID NO: 402 - RNA, 19 nt, synthetic construct
  misc_feature 1..19: note = Synthetic: WV-41048
  misc_feature 1..19: note = Synthetic: SSR-0101542
  modified_base 1: mod_base = OTHER; note = triantennary GalNAc with C12 linker linked to 6-aminohexanol linked by phosphate to the 5' end of 2-O-methylribose guanine
  modified_base 1..2: mod_base = OTHER; note = phosphorothioate
  modified_base 2: mod_base = um
  modified_base 3: mod_base = OTHER; note = 2-fluororibose adenine
  modified_base 4: mod_base = um
  modified_base 5: mod_base = OTHER; note = 2-fluororibose cytosine
  modified_base 6: mod_base = OTHER; note = 2-O-methylribose adenine
  modified_base 7: mod_base = OTHER; note = 2-fluororibose adenine
  modified_base 8: mod_base = OTHER; note = 2-fluororibose adenine
  modified_base 9: mod_base = OTHER; note = 2-fluororibose adenine
  modified_base 10: mod_base = cm
  modified_base 11: mod_base = OTHER; note = 2-fluororibose cytosine
  modified_base 12: mod_base = um
  modified_base 13: mod_base = OTHER; note = 2-fluororibose cytosine
  modified_base 14: mod_base = OTHER; note = 2-O-methylribose adenine
  modified_base 15: mod_base = OTHER; note = 2-fluororibose uracil
  modified_base 16: mod_base = gm
  modified_base 17: mod_base = OTHER; note = 2-fluororibose uracil
  modified_base 18: mod_base = cm
  modified_base 18..19: mod_base = OTHER; note = phosphorothioate
  modified_base 19: mod_base = OTHER; note = 2-fluororibose adenine
  source 1..19: mol_type = other RNA
gtatcaaaacctcatgtca

SEQ ID NO: 403 - RNA, 19 nt, synthetic construct
  misc_feature 1..19: note = Synthetic: WV-41049
  misc_feature 1..19: note = Synthetic: SSR-0101543
  modified_base 1: mod_base = OTHER; note = triantennary GalNAc with C12 linker linked to 6-aminohexanol linked by phosphate to the 5' end of 2-O-methylribose guanine
  modified_base 1..2: mod_base = OTHER; note = phosphorothioate
  modified_base 2: mod_base = OTHER; note = 2-O-methylribose adenine
  modified_base 3: mod_base = OTHER; note = 2-fluororibose adenine
  modified_base 4: mod_base = um
  modified_base 5: mod_base = OTHER; note = 2-fluororibose adenine
  modified_base 6: mod_base = cm
  modified_base 7: mod_base = OTHER; note = 2-fluororibose uracil
  modified_base 8: mod_base = OTHER; note = 2-fluororibose uracil
  modified_base 9: mod_base = OTHER; note = 2-fluororibose adenine
  modified_base 10: mod_base = cm
  modified_base 11: mod_base = OTHER; note = 2-fluororibose cytosine
  modified_base 12: mod_base = OTHER; note = 2-O-methylribose adenine
  modified_base 13: mod_base = OTHER; note = 2-fluororibose adenine
  modified_base 14: mod_base = um
  modified_base 15: mod_base = OTHER; note = 2-fluororibose adenine
  modified_base 16: mod_base = OTHER; note = 2-O-methylribose adenine
  modified_base 17: mod_base = OTHER; note = 2-fluororibose guanine
  modified_base 18: mod_base = OTHER; note = 2-O-methylribose adenine
  modified_base 18..19: mod_base = OTHER; note = phosphorothioate
  modified_base 19: mod_base = OTHER; note = 2-fluororibose adenine
  source 1..19: mol_type = other RNA
gaatacttaccaataagaa

SEQ ID NO: 404 - RNA, 19 nt, synthetic construct
  misc_feature 1..19: note = Synthetic: WV-41050
  misc_feature 1..19: note = Synthetic: SSR-0101544
  modified_base 1: mod_base = OTHER; note = triantennary GalNAc with C12 linker linked to 6-aminohexanol linked by phosphate to the 5' end of 2-O-methylribose adenine
  modified_base 1..2: mod_base = OTHER; note = phosphorothioate
  modified_base 2: mod_base = gm
  modified_base 3: mod_base = OTHER; note = 2-fluororibose adenine
  modified_base 4: mod_base = OTHER; note = 2-O-methylribose adenine
  modified_base 5: mod_base = OTHER; note = 2-fluororibose guanine
  modified_base 6: mod_base = um
  modified_base 7: mod_base = OTHER; note = 2-fluororibose cytosine
  modified_base 8: mod_base = OTHER; note = 2-fluororibose uracil
  modified_base 9: mod_base = OTHER; note = 2-fluororibose guanine
  modified_base 10: mod_base = OTHER; note = 2-O-methylribose adenine
  modified_base 11: mod_base = OTHER; note = 2-fluororibose uracil
  modified_base 12: mod_base = OTHER; note = 2-O-methylribose adenine
  modified_base 13: mod_base = OTHER; note = 2-fluororibose guanine
  modified_base 14: mod_base = OTHER; note = 2-O-methylribose adenine
  modified_base 15: mod_base = OTHER; note = 2-fluororibose uracil
  modified_base 16: mod_base = gm
  modified_base 17: mod_base = OTHER; note = 2-fluororibose guanine
  modified_base 18: mod_base = OTHER; note = 2-O-methylribose adenine
  modified_base 18..19: mod_base = OTHER; note = phosphorothioate
  modified_base 19: mod_base = OTHER; note = 2-fluororibose adenine
  source 1..19: mol_type = other RNA
agaagtctgatagatggaa

SEQ ID NO: 405 - RNA, 19 nt, synthetic construct
  misc_feature 1..19: note = Synthetic: WV-41051
  misc_feature 1..19: note = Synthetic: SSR-0101545
  modified_base 1: mod_base = OTHER; note = triantennary GalNAc with C12 linker linked to 6-aminohexanol linked by phosphate to the 5' end of 2-O-methylribose adenine
  modified_base 1..2: mod_base = OTHER; note = phosphorothioate
  modified_base 2: mod_base = um
  modified_base 3: mod_base = OTHER; note = 2-fluororibose guanine
  modified_base 4: mod_base = gm
  modified_base 5: mod_base = OTHER; note = 2-fluororibose adenine
  modified_base 6: mod_base = OTHER; note = 2-O-methylribose adenine
  modified_base 7: mod_base = OTHER; note = 2-fluororibose uracil
  modified_base 8: mod_base = OTHER; note = 2-fluororibose adenine
  modified_base 9: mod_base = OTHER; note = 2-fluororibose cytosine
  modified_base 10: mod_base = um
  modified_base 11: mod_base = OTHER; note = 2-fluororibose uracil
  modified_base 12: mod_base = OTHER; note = 2-O-methylribose adenine
  modified_base 13: mod_base = OTHER; note = 2-fluororibose cytosine
  modified_base 14: mod_base = cm
  modified_base 15: mod_base = OTHER; note = 2-fluororibose adenine
  modified_base 16: mod_base = OTHER; note = 2-O-methylribose adenine
  modified_base 17: mod_base = OTHER; note = 2-fluororibose uracil
  modified_base 18: mod_base = OTHER; note = 2-O-methylribose adenine
  modified_base 18..19: mod_base = OTHER; note = phosphorothioate
  modified_base 19: mod_base = OTHER; note = 2-fluororibose adenine
  source 1..19: mol_type = other RNA
atggaatacttaccaataa

SEQ ID NO: 406 - RNA, 19 nt, synthetic construct
  misc_feature 1..19: note = Synthetic: WV-41052
  misc_feature 1..19: note = Synthetic: SSR-0101546
  modified_base 1: mod_base = OTHER; note = triantennary GalNAc with C12 linker linked to 6-aminohexanol linked by phosphate to the 5' end of 2-O-methylribose guanine
  modified_base 1..2: mod_base = OTHER; note = phosphorothioate
  modified_base 2: mod_base = gm
  modified_base 3: mod_base = OTHER; note = 2-fluororibose cytosine
  modified_base 4: mod_base = cm
  modified_base 5: mod_base = OTHER; note = 2-fluororibose uracil
  modified_base 6: mod_base = gm
  modified_base 7: mod_base = OTHER; note = 2-fluororibose uracil
  modified_base 8: mod_base = OTHER; note = 2-fluororibose adenine
  modified_base 9: mod_base = OTHER; note = 2-fluororibose uracil
  modified_base 10: mod_base = um
  modified_base 11: mod_base = OTHER; note = 2-fluororibose guanine
  modified_base 12: mod_base = gm
  modified_base 13: mod_base = OTHER; note = 2-fluororibose adenine
  modified_base 14: mod_base = gm
  modified_base 15: mod_base = OTHER; note = 2-fluororibose adenine
  modified_base 16: mod_base = cm
  modified_base 17: mod_base = OTHER; note = 2-fluororibose adenine
  modified_base 18: mod_base = gm
  modified_base 18..19: mod_base = OTHER; note = phosphorothioate
  modified_base 19: mod_base = OTHER; note = 2-fluororibose adenine
  source 1..19: mol_type = other RNA
ggcctgtattggagacaga

SEQ ID NO: 407 - RNA, 19 nt, synthetic construct
  misc_feature 1..19: note = Synthetic: WV-41053
  misc_feature 1..19: note = Synthetic: SSR-0101547
  modified_base 1: mod_base = OTHER; note = triantennary GalNAc with C12 linker linked to 6-aminohexanol linked by phosphate to the 5' end of 2-O-methylribose guanine
  modified_base 1..2: mod_base = OTHER; note = phosphorothioate
  modified_base 2: mod_base = gm
  modified_base 3: mod_base = OTHER; note = 2-fluororibose guanine
  modified_base 4: mod_base = um
  modified_base 5: mod_base = OTHER; note = 2-fluororibose uracil
  modified_base 6: mod_base = cm
  modified_base 7: mod_base = OTHER; note = 2-fluororibose adenine
  modified_base 8: mod_base = OTHER; note = 2-fluororibose cytosine
  modified_base 9: mod_base = OTHER; note = 2-fluororibose cytosine
  modified_base 10: mod_base = OTHER; note = 2-O-methylribose adenine
  modified_base 11: mod_base = OTHER; note = 2-fluororibose adenine
  modified_base 12: mod_base = OTHER; note = 2-O-methylribose adenine
  modified_base 13: mod_base = OTHER; note = 2-fluororibose adenine
  modified_base 14: mod_base = OTHER; note = 2-O-methylribose adenine
  modified_base 15: mod_base = OTHER; note = 2-fluororibose uracil
  modified_base 16: mod_base = cm
  modified_base 17: mod_base = OTHER; note = 2-fluororibose cytosine
  modified_base 18: mod_base = OTHER; note = 2-O-methylribose adenine
  modified_base 18..19: mod_base = OTHER; note = phosphorothioate
  modified_base 19: mod_base = OTHER; note = 2-fluororibose adenine
  source 1..19: mol_type = other RNA
gggttcaccaaaaatccaa

SEQ ID NO: 408 - RNA, 19 nt, synthetic construct
  misc_feature 1..19: note = Synthetic: WV-41054
  misc_feature 1..19: note = Synthetic: SSR-0101548
  modified_base 1: mod_base = OTHER; note = triantennary GalNAc with C12 linker linked to 6-aminohexanol linked by phosphate to the 5' end of 2-O-methylribose guanine
  modified_base 1..2: mod_base = OTHER; note = phosphorothioate
  modified_base 2: mod_base = OTHER; note = 2-O-methylribose adenine
  modified_base 3: mod_base = OTHER; note = 2-fluororibose cytosine
  modified_base 4: mod_base = OTHER; note = 2-O-methylribose adenine
  modified_base 5: mod_base = OTHER; note = 2-fluororibose guanine
  modified_base 6: mod_base = OTHER; note = 2-O-methylribose adenine
  modified_base 7: mod_base = OTHER; note = 2-fluororibose uracil
  modified_base 8: mod_base = OTHER; note = 2-fluororibose guanine
  modified_base 9: mod_base = OTHER; note = 2-fluororibose adenine
  modified_base 10: mod_base = OTHER; note = 2-O-methylribose adenine
  modified_base 11: mod_base = OTHER; note = 2-fluororibose guanine
  modified_base 12: mod_base = um
  modified_base 13: mod_base = OTHER; note = 2-fluororibose cytosine
  modified_base 14: mod_base = gm
  modified_base 15: mod_base = OTHER; note = 2-fluororibose uracil
  modified_base 16: mod_base = OTHER; note = 2-O-methylribose adenine
  modified_base 17: mod_base = OTHER; note = 2-fluororibose adenine
  modified_base 18: mod_base = gm
  modified_base 18..19: mod_base = OTHER; note = phosphorothioate
  modified_base 19: mod_base = OTHER; note = 2-fluororibose adenine
  source 1..19: mol_type = other RNA
gacagatgaagtcgtaaga

SEQ ID NO: 409 - RNA, 19 nt, synthetic construct
  misc_feature 1..19: note = Synthetic: WV-41055
  misc_feature 1..19: note = Synthetic: SSR-0101549
  modified_base 1: mod_base = OTHER; note = triantennary GalNAc with C12 linker linked to 6-aminohexanol linked by phosphate to the 5' end of 2-O-methylribose cytosine
  modified_base 1..2: mod_base = OTHER; note = phosphorothioate
  modified_base 2: mod_base = um
  modified_base 3: mod_base = OTHER; note = 2-fluororibose guanine
  modified_base 4: mod_base = OTHER; note = 2-O-methylribose adenine
  modified_base 5: mod_base = OTHER; note = 2-fluororibose uracil
  modified_base 6: mod_base = OTHER; note = 2-O-methylribose adenine
  modified_base 7: mod_base = OTHER; note = 2-fluororibose guanine
  modified_base 8: mod_base = OTHER; note = 2-fluororibose adenine
  modified_base 9: mod_base = OTHER; note = 2-fluororibose uracil
  modified_base 10: mod_base = gm
  modified_base 11: mod_base = OTHER; note = 2-fluororibose guanine
  modified_base 12: mod_base = OTHER; note = 2-O-methylribose adenine
  modified_base 13: mod_base = OTHER; note = 2-fluororibose adenine
  modified_base 14: mod_base = um
  modified_base 15: mod_base = OTHER; note = 2-fluororibose adenine
  modified_base 16: mod_base = cm
  modified_base 17: mod_base = OTHER; note = 2-fluororibose uracil
  modified_base 18: mod_base = um
  modified_base 18..19: mod_base = OTHER; note = phosphorothioate
  modified_base 19: mod_base = OTHER; note = 2-fluororibose adenine
  source 1..19: mol_type = other RNA
ctgatagatggaatactta

SEQ ID NO: 410 - RNA, 19 nt, synthetic construct
  misc_feature 1..19: note = Synthetic: WV-41056
  misc_feature 1..19: note = Synthetic: SSR-0101550
  modified_base 1: mod_base = OTHER; note = triantennary GalNAc with C12 linker linked to 6-aminohexanol linked by phosphate to the 5' end of 2-O-methylribose guanine
  modified_base 1..2: mod_base = OTHER; note = phosphorothioate
  modified_base 2: mod_base = OTHER; note = 2-O-methylribose adenine
  modified_base 3: mod_base = OTHER; note = 2-fluororibose uracil
  modified_base 4: mod_base = gm
  modified_base 5: mod_base = OTHER; note = 2-fluororibose uracil
  modified_base 6: mod_base = OTHER; note = 2-O-methylribose adenine
  modified_base 7: mod_base = OTHER; note = 2-fluororibose adenine
  modified_base 8: mod_base = OTHER; note = 2-fluororibose cytosine
  modified_base 9: mod_base = OTHER; note = 2-fluororibose adenine
  modified_base 10: mod_base = OTHER; note = 2-O-methylribose adenine
  modified_base 11: mod_base = OTHER; note = 2-fluororibose uracil
  modified_base 12: mod_base = cm
  modified_base 13: mod_base = OTHER; note = 2-fluororibose guanine
  modified_base 14: mod_base = um
  modified_base 15: mod_base = OTHER; note = 2-fluororibose guanine
  modified_base 16: mod_base = gm
  modified_base 17: mod_base = OTHER; note = 2-fluororibose uracil
  modified_base 18: mod_base = gm
  modified_base 18..19: mod_base = OTHER; note = phosphorothioate
  modified_base 19: mod_base = OTHER; note = 2-fluororibose adenine
  source 1..19: mol_type = other RNA
gatgtaacaatcgtggtga

SEQ ID NO: 411 - RNA, 19 nt, synthetic construct
  misc_feature 1..19: note = Synthetic: WV-41057
  misc_feature 1..19: note = Synthetic: SSR-0101551
  modified_base 1: mod_base = OTHER; note = triantennary GalNAc with C12 linker linked to 6-aminohexanol linked by phosphate to the 5' end of 2-O-methylribose adenine
  modified_base 1..2: mod_base = OTHER; note = phosphorothioate
  modified_base 2: mod_base = gm
  modified_base 3: mod_base = OTHER; note = 2-fluororibose adenine
  modified_base 4: mod_base = OTHER; note = 2-O-methylribose adenine
  modified_base 5: mod_base = OTHER; note = 2-fluororibose guanine
  modified_base 6: mod_base = um
  modified_base 7: mod_base = OTHER; note = 2-fluororibose guanine
  modified_base 8: mod_base = OTHER; note = 2-fluororibose guanine
  modified_base 9: mod_base = OTHER; note = 2-fluororibose guanine
  modified_base 10: mod_base = um
  modified_base 11: mod_base = OTHER; note = 2-fluororibose guanine
  modified_base 12: mod_base = OTHER; note = 2-O-methylribose adenine
  modified_base 13: mod_base = OTHER; note = 2-fluororibose uracil
  modified_base 14: mod_base = gm
  modified_base 15: mod_base = OTHER; note = 2-fluororibose uracil
  modified_base 16: mod_base = OTHER; note = 2-O-methylribose adenine
  modified_base 17: mod_base = OTHER; note = 2-fluororibose adenine
  modified_base 18: mod_base = cm
  modified_base 18..19: mod_base = OTHER; note = phosphorothioate
  modified_base 19: mod_base = OTHER; note = 2-fluororibose adenine
  source 1..19: mol_type = other RNA
agaagtgggtgatgtaaca

SEQ ID NO: 412 - RNA, 19 nt, synthetic construct
  misc_feature 1..19: note = Synthetic: WV-41058
  misc_feature 1..19: note = Synthetic: SSR-0101552
  modified_base 1: mod_base = OTHER; note = triantennary GalNAc with C12 linker linked to 6-aminohexanol linked by phosphate to the 5' end of 2-O-methylribose uracil
  modified_base 1..2: mod_base = OTHER; note = phosphorothioate
  modified_base 2: mod_base = OTHER; note = 2-O-methylribose adenine
  modified_base 3: mod_base = OTHER; note = 2-fluororibose adenine
  modified_base 4: mod_base = cm
  modified_base 5: mod_base = OTHER; note = 2-fluororibose adenine
  modified_base 6: mod_base = OTHER; note = 2-O-methylribose adenine
  modified_base 7: mod_base = OTHER; note = 2-fluororibose uracil
  modified_base 8: mod_base = OTHER; note = 2-fluororibose cytosine
  modified_base 9: mod_base = OTHER; note = 2-fluororibose guanine
  modified_base 10: mod_base = um
  modified_base 11: mod_base = OTHER; note = 2-fluororibose guanine
  modified_base 12: mod_base = gm
  modified_base 13: mod_base = OTHER; note = 2-fluororibose uracil
  modified_base 14: mod_base = gm
  modified_base 15: mod_base = OTHER; note = 2-fluororibose adenine
  modified_base 16: mod_base = OTHER; note = 2-O-methylribose adenine
  modified_base 17: mod_base = OTHER; note = 2-fluororibose uracil
  modified_base 18: mod_base = OTHER; note = 2-O-methylribose adenine
  modified_base 18..19: mod_base = OTHER; note = phosphorothioate
  modified_base 19: mod_base = OTHER; note = 2-fluororibose adenine
  source 1..19: mol_type = other RNA
taacaatcgtggtgaataa

SEQ ID NO: 413 - RNA, 19 nt, synthetic construct
  misc_feature 1..19: note = Synthetic: WV-41059
  misc_feature 1..19: note = Synthetic: SSR-0101553
  modified_base 1: mod_base = OTHER; note = triantennary GalNAc with C12 linker linked to 6-aminohexanol linked by phosphate to the 5' end of 2-O-methylribose cytosine
  modified_base 1..2: mod_base = OTHER; note = phosphorothioate
  modified_base 2: mod_base = um
  modified_base 3: mod_base = OTHER; note = 2-fluororibose adenine
  modified_base 4: mod_base = gm
  modified_base 5: mod_base = OTHER; note = 2-fluororibose guanine
  modified_base 6: mod_base = OTHER; note = 2-O-methylribose adenine
  modified_base 7: mod_base = OTHER; note = 2-fluororibose cytosine
  modified_base 8: mod_base = OTHER; note = 2-fluororibose adenine
  modified_base 9: mod_base = OTHER; note = 2-fluororibose uracil
  modified_base 10: mod_base = um
  modified_base 11: mod_base = OTHER; note = 2-fluororibose uracil
  modified_base 12: mod_base = um
  modified_base 13: mod_base = OTHER; note = 2-fluororibose uracil
  modified_base 14: mod_base = gm
  modified_base 15: mod_base = OTHER; note = 2-fluororibose guanine
  modified_base 16: mod_base = OTHER; note = 2-O-methylribose adenine
  modified_base 17: mod_base = OTHER; note = 2-fluororibose uracil
  modified_base 18: mod_base = cm
  modified_base 18..19: mod_base = OTHER; note = phosphorothioate
  modified_base 19: mod_base = OTHER; note = 2-fluororibose adenine
  source 1..19: mol_type = other RNA
ctaggacatttttggatca

SEQ ID NO: 414 - RNA, 19 nt, synthetic construct
  misc_feature 1..19: note = Synthetic: WV-41060
  misc_feature 1..19: note = Synthetic: SSR-0101554
  modified_base 1: mod_base = OTHER; note = triantennary GalNAc with C12 linker linked to 6-aminohexanol linked by phosphate to the 5' end of 2-O-methylribose guanine
  modified_base 1..2: mod_base = OTHER; note = phosphorothioate
  modified_base 2: mod_base = gm
  modified_base 3: mod_base = OTHER; note = 2-fluororibose adenine
  modified_base 4: mod_base = OTHER; note = 2-O-methylribose adenine
  modified_base 5: mod_base = OTHER; note = 2-fluororibose uracil
  modified_base 6: mod_base = OTHER; note = 2-O-methylribose adenine
  modified_base 7: mod_base = OTHER; note = 2-fluororibose cytosine
  modified_base 8: mod_base = OTHER; note = 2-fluororibose uracil
  modified_base 9: mod_base = OTHER; note = 2-fluororibose uracil
  modified_base 10: mod_base = OTHER; note = 2-O-methylribose adenine
  modified_base 11: mod_base = OTHER; note = 2-fluororibose cytosine
  modified_base 12: mod_base = cm
  modified_base 13: mod_base = OTHER; note = 2-fluororibose adenine
  modified_base 14: mod_base = OTHER; note = 2-O-methylribose adenine
  modified_base 15: mod_base = OTHER; note = 2-fluororibose uracil
  modified_base 16: mod_base = OTHER; note = 2-O-methylribose adenine
  modified_base 17: mod_base = OTHER; note = 2-fluororibose adenine
  modified_base 18: mod_base = gm
  modified_base 18..19: mod_base = OTHER; note = phosphorothioate
  modified_base 19: mod_base = OTHER; note = 2-fluororibose adenine
  source 1..19: mol_type = other RNA
ggaatacttaccaataaga

SEQ ID NO: 415 - RNA, 19 nt, synthetic construct
  misc_feature 1..19: note = Synthetic: WV-41061
  misc_feature 1..19: note = Synthetic: SSR-0101555
  modified_base 1: mod_base = OTHER; note = triantennary GalNAc with C12 linker linked to 6-aminohexanol linked by phosphate to the 5' end of 2-O-methylribose adenine
  modified_base 1..2: mod_base = OTHER; note = phosphorothioate
  modified_base 2: mod_base = OTHER; note = 2-O-methylribose adenine
  modified_base 3: mod_base = OTHER; note = 2-fluororibose uracil
  modified_base 4: mod_base = cm
  modified_base 5: mod_base = OTHER; note = 2-fluororibose adenine
  modified_base 6: mod_base = OTHER; note = 2-O-methylribose adenine
  modified_base 7: mod_base = OTHER; note = 2-fluororibose uracil
  modified_base 8: mod_base = OTHER; note = 2-fluororibose guanine
  modified_base 9: mod_base = OTHER; note = 2-fluororibose cytosine
  modified_base 10: mod_base = um
  modified_base 11: mod_base = OTHER; note = 2-fluororibose guanine
  modified_base 12: mod_base = cm
  modified_base 13: mod_base = OTHER; note = 2-fluororibose adenine
  modified_base 14: mod_base = OTHER; note = 2-O-methylribose adenine
  modified_base 15: mod_base = OTHER; note = 2-fluororibose adenine
  modified_base 16: mod_base = gm
  modified_base 17: mod_base = OTHER; note = 2-fluororibose cytosine
  modified_base 18: mod_base = um
  modified_base 18..19: mod_base = OTHER; note = phosphorothioate
  modified_base 19: mod_base = OTHER; note = 2-fluororibose adenine
  source 1..19: mol_type = other RNA
aatcaatgctgcaaagcta

SEQ ID NO: 416 - RNA, 19 nt, synthetic construct
  misc_feature 1..19: note = Synthetic: WV-41062
  misc_feature 1..19: note = Synthetic: SSR-0101556
  modified_base 1: mod_base = OTHER; note = triantennary GalNAc with C12 linker linked to 6-aminohexanol linked by phosphate to the 5' end of 2-O-methylribose guanine
  modified_base 1..2: mod_base = OTHER; note = phosphorothioate
  modified_base 2: mod_base = um
  modified_base 3: mod_base = OTHER; note = 2-fluororibose cytosine
  modified_base 4: mod_base = um
  modified_base 5: mod_base = OTHER; note = 2-fluororibose guanine
  modified_base 6: mod_base = OTHER; note = 2-O-methylribose adenine
  modified_base 7: mod_base = OTHER; note = 2-fluororibose cytosine
  modified_base 8: mod_base = OTHER; note = 2-fluororibose adenine
  modified_base 9: mod_base = OTHER; note = 2-fluororibose uracil
  modified_base 10: mod_base = cm
  modified_base 11: mod_base = OTHER; note = 2-fluororibose adenine
  modified_base 12: mod_base = gm
  modified_base 13: mod_base = OTHER; note = 2-fluororibose adenine
  modified_base 14: mod_base = OTHER; note = 2-O-methylribose adenine
  modified_base 15: mod_base = OTHER; note = 2-fluororibose cytosine
  modified_base 16: mod_base = um
  modified_base 17: mod_base = OTHER; note = 2-fluororibose uracil
  modified_base 18: mod_base = cm
  modified_base 18..19: mod_base = OTHER; note = phosphorothioate
  modified_base 19: mod_base = OTHER; note = 2-fluororibose adenine
  source 1..19: mol_type = other RNA
gtctgacatcagaacttca

SEQ ID NO: 417 - RNA, 19 nt, synthetic construct
  misc_feature 1..19: note = Synthetic: WV-41063
  misc_feature 1..19: note = Synthetic: SSR-0101557
  modified_base 1: mod_base = OTHER; note = triantennary GalNAc with C12 linker linked to 6-aminohexanol linked by phosphate to the 5' end of 2-O-methylribose cytosine
  modified_base 1..2: mod_base = OTHER; note = phosphorothioate
  modified_base 2: mod_base = OTHER; note = 2-O-methylribose adenine
  modified_base 3: mod_base = OTHER; note = 2-fluororibose cytosine
  modified_base 4: mod_base = cm
  modified_base 5: mod_base = OTHER; note = 2-fluororibose adenine
  modified_base 6: mod_base = OTHER; note = 2-O-methylribose adenine
  modified_base 7: mod_base = OTHER; note = 2-fluororibose guanine
  modified_base 8: mod_base = OTHER; note = 2-fluororibose guanine
  modified_base 9: mod_base = OTHER; note = 2-fluororibose adenine
  modified_base 10: mod_base = um
  modified_base 11: mod_base = OTHER; note = 2-fluororibose guanine
  modified_base 12: mod_base = OTHER; note = 2-O-methylribose adenine
  modified_base 13: mod_base = OTHER; note = 2-fluororibose adenine
  modified_base 14: mod_base = gm
  modified_base 15: mod_base = OTHER; note = 2-fluororibose adenine
  modified_base 16: mod_base = gm
  modified_base 17: mod_base = OTHER; note = 2-fluororibose adenine
  modified_base 18: mod_base = um
  modified_base 18..19: mod_base = OTHER; note = phosphorothioate
  modified_base 19: mod_base = OTHER; note = 2-fluororibose adenine
  source 1..19: mol_type = other RNA
caccaaggatgaagagata

SEQ ID NO: 418 - RNA, 19 nt, synthetic construct
  misc_feature 1..19: note = Synthetic: WV-41064
  misc_feature 1..19: note = Synthetic: SSR-0101558
  modified_base 1: mod_base = OTHER; note = triantennary GalNAc with C12 linker linked to 6-aminohexanol linked by phosphate to the 5' end of 2-O-methylribose guanine
  modified_base 1..2: mod_base = OTHER; note = phosphorothioate
  modified_base 2: mod_base = OTHER; note = 2-O-methylribose adenine
  modified_base 3: mod_base = OTHER; note = 2-fluororibose adenine
  modified_base 4: mod_base = um
  modified_base 5: mod_base = OTHER; note = 2-fluororibose adenine
  modified_base 6: mod_base = cm
  modified_base 7: mod_base = OTHER; note = 2-fluororibose uracil
  modified_base 8: mod_base = OTHER; note = 2-fluororibose guanine
  modified_base 9: mod_base = OTHER; note = 2-fluororibose guanine
  modified_base 10: mod_base = gm
  modified_base 11: mod_base = OTHER; note = 2-fluororibose uracil
  modified_base 12: mod_base = um
  modified_base 13: mod_base = OTHER; note = 2-fluororibose cytosine
  modified_base 14: mod_base = OTHER; note = 2-O-methylribose adenine
  modified_base 15: mod_base = OTHER; note = 2-fluororibose cytosine
  modified_base 16: mod_base = cm
  modified_base 17: mod_base = OTHER; note = 2-fluororibose adenine
  modified_base 18: mod_base = OTHER; note = 2-O-methylribose adenine
  modified_base 18..19: mod_base = OTHER; note = phosphorothioate
  modified_base 19: mod_base = OTHER; note = 2-fluororibose adenine
  source 1..19: mol_type = other RNA
gaatactgggttcaccaaa

SEQ ID NO: 419 - RNA, 19 nt, synthetic construct
  misc_feature 1..19: note = Synthetic: WV-41065
  misc_feature 1..19: note = Synthetic: SSR-0101559
  modified_base 1: mod_base = OTHER; note = triantennary GalNAc with C12 linker linked to 6-aminohexanol linked by phosphate to the 5' end of 2-O-methylribose cytosine
  modified_base 1..2: mod_base = OTHER; note = phosphorothioate
  modified_base 2: mod_base = OTHER; note = 2-O-methylribose adenine
  modified_base 3: mod_base = OTHER; note = 2-fluororibose uracil
  modified_base 4: mod_base = um
  modified_base 5: mod_base = OTHER; note = 2-fluororibose uracil
  modified_base 6: mod_base = gm
  modified_base 7: mod_base = OTHER; note = 2-fluororibose adenine
  modified_base 8: mod_base = OTHER; note = 2-fluororibose guanine
  modified_base 9: mod_base = OTHER; note = 2-fluororibose guanine
  modified_base 10: mod_base = um
  modified_base 11: mod_base = OTHER; note = 2-fluororibose cytosine
  modified_base 12: mod_base = OTHER; note = 2-O-methylribose adenine
  modified_base 13: mod_base = OTHER; note = 2-fluororibose adenine
  modified_base 14: mod_base = cm
  modified_base 15: mod_base = OTHER; note = 2-fluororibose adenine
  modified_base 16: mod_base = um
  modified_base 17: mod_base = OTHER; note = 2-fluororibose cytosine
  modified_base 18: mod_base = cm
  modified_base 18..19: mod_base = OTHER; note = phosphorothioate
  modified_base 19: mod_base = OTHER; note = 2-fluororibose adenine
  source 1..19: mol_type = other RNA
catttgaggtcaacatcca

SEQ ID NO: 420 - RNA, 19 nt, synthetic construct
  misc_feature 1..19: note = Synthetic: WV-41066
  misc_feature 1..19: note = Synthetic: SSR-0101560
  modified_base 1: mod_base = OTHER; note = 6-aminohexanol linked by phosphate to the 5' end of 2-O-methylribose guanine
  modified_base 1..2: mod_base = OTHER; note = phosphorothioate
  modified_base 2: mod_base = gm
  modified_base 3: mod_base = OTHER; note = 2-fluororibose cytosine
  modified_base 4: mod_base = um
  modified_base 5: mod_base = OTHER; note = 2-fluororibose uracil
  modified_base 6: mod_base = um
  modified_base 7: mod_base = OTHER; note = 2-fluororibose cytosine
  modified_base 8: mod_base = OTHER; note = 2-fluororibose adenine
  modified_base 9: mod_base = OTHER; note = 2-fluororibose cytosine
  modified_base 10: mod_base = OTHER; note = 2-O-methylribose adenine
  modified_base 11: mod_base = OTHER; note = 2-fluororibose guanine
  modified_base 12: mod_base = OTHER; note = 2-O-methylribose adenine
  modified_base 13: mod_base = OTHER; note = 2-fluororibose guanine
  modified_base 14: mod_base = gm
  modified_base 15: mod_base = OTHER; note = 2-fluororibose uracil
  modified_base 16: mod_base = cm
  modified_base 17: mod_base = OTHER; note = 2-fluororibose uracil
  modified_base 18: mod_base = gm
  modified_base 18..19: mod_base = OTHER; note = phosphorothioate
  modified_base 19: mod_base = OTHER; note = 2-fluororibose adenine
  source 1..19: mol_type = other RNA
ggctttcacagaggtctga

SEQ ID NO: 421 - RNA, 19 nt, synthetic construct
  misc_feature 1..19: note = Synthetic: WV-41067
  misc_feature 1..19: note = Synthetic: SSR-0101561
  modified_base 1: mod_base = OTHER; note = 6-aminohexanol linked by phosphate to the 5' end of 2-O-methylribose cytosine
  modified_base 1..2: mod_base = OTHER; note = phosphorothioate
  modified_base 2: mod_base = gm
  modified_base 3: mod_base = OTHER; note = 2-fluororibose cytosine
  modified_base 4: mod_base = um
  modified_base 5: mod_base = OTHER; note = 2-fluororibose guanine
  modified_base 6: mod_base = um
  modified_base 7: mod_base = OTHER; note = 2-fluororibose uracil
  modified_base 8: mod_base = OTHER; note = 2-fluororibose guanine
  modified_base 9: mod_base = OTHER; note = 2-fluororibose guanine
  modified_base 10: mod_base = cm
  modified_base 11: mod_base = OTHER; note = 2-fluororibose uracil
  modified_base 12: mod_base = um
  modified_base 13: mod_base = OTHER; note = 2-fluororibose uracil
  modified_base 14: mod_base = cm
  modified_base 15: mod_base = OTHER; note = 2-fluororibose adenine
  modified_base 16: mod_base = cm
  modified_base 17: mod_base = OTHER; note = 2-fluororibose adenine
  modified_base 18: mod_base = gm
  modified_base 18..19: mod_base = OTHER; note = phosphorothioate
  modified_base 19: mod_base = OTHER; note = 2-fluororibose adenine
  source 1..19: mol_type = other RNA
cgctgttggctttcacaga

SEQ ID NO: 422 - RNA, 19 nt, synthetic construct
  misc_feature 1..19: note = Synthetic: WV-41068
  misc_feature 1..19: note = Synthetic: SSR-0101562
  modified_base 1: mod_base = OTHER; note = 6-aminohexanol linked by phosphate to the 5' end of 2-O-methylribose cytosine
  modified_base 1..2: mod_base = OTHER; note = phosphorothioate
  modified_base 2: mod_base = um
  modified_base 3: mod_base = OTHER; note = 2-fluororibose uracil
  modified_base 4: mod_base = um
  modified_base 5: mod_base = OTHER; note = 2-fluororibose cytosine
  modified_base 6: mod_base = OTHER; note = 2-O-methylribose adenine
  modified_base 7: mod_base = OTHER; note = 2-fluororibose cytosine
  modified_base 8: mod_base = OTHER; note = 2-fluororibose adenine
  modified_base 9: mod_base = OTHER; note = 2-fluororibose guanine
  modified_base 10: mod_base = OTHER; note = 2-O-methylribose adenine
  modified_base 11: mod_base = OTHER; note = 2-fluororibose guanine
  modified_base 12: mod_base = gm
  modified_base 13: mod_base = OTHER; note = 2-fluororibose uracil
  modified_base 14: mod_base = cm
  modified_base 15: mod_base = OTHER; note = 2-fluororibose uracil
  modified_base 16: mod_base = gm
  modified_base 17: mod_base = OTHER; note = 2-fluororibose adenine
  modified_base 18: mod_base = cm
  modified_base 18..19: mod_base = OTHER; note = phosphorothioate
  modified_base 19: mod_base = OTHER; note = 2-fluororibose adenine
  source 1..19: mol_type = other RNA
ctttcacagaggtctgaca

SEQ ID NO: 423 - RNA, 19 nt, synthetic construct
  misc_feature 1..19: note = Synthetic: WV-41069
  misc_feature 1..19: note = Synthetic: SSR-0101563
  modified_base 1: mod_base = OTHER; note = 6-aminohexanol linked by phosphate to the 5' end of 2-O-methylribose guanine
  modified_base 1..2: mod_base = OTHER; note = phosphorothioate
  modified_base 2: mod_base = gm
  modified_base 3: mod_base = OTHER; note = 2-fluororibose guanine
  modified_base 4: mod_base = OTHER; note = 2-O-methylribose adenine
  modified_base 5: mod_base = OTHER; note = 2-fluororibose adenine
  modified_base 6: mod_base = OTHER; note = 2-O-methylribose adenine
  modified_base 7: mod_base = OTHER; note = 2-fluororibose adenine
  modified_base 8: mod_base = OTHER; note = 2-fluororibose adenine
  modified_base 9: mod_base = OTHER; note = 2-fluororibose cytosine
  modified_base 10: mod_base = um
  modified_base 11: mod_base = OTHER; note = 2-fluororibose guanine
  modified_base 12: mod_base = gm
  modified_base 13: mod_base = OTHER; note = 2-fluororibose uracil
  modified_base 14: mod_base = OTHER; note = 2-O-methylribose adenine
  modified_base 15: mod_base = OTHER; note = 2-fluororibose uracil
  modified_base 16: mod_base = cm
  modified_base 17: mod_base = OTHER; note = 2-fluororibose adenine
  modified_base 18: mod_base = OTHER; note = 2-O-methylribose adenine
  modified_base 18..19: mod_base = OTHER; note = phosphorothioate
  modified_base 19: mod_base = OTHER; note = 2-fluororibose adenine
  source 1..19: mol_type = other RNA
gggaaaaactggtatcaaa

SEQ ID NO: 424 - RNA, 19 nt, synthetic construct
  misc_feature 1..19: note = Synthetic: WV-41070
  misc_feature 1..19: note = Synthetic: SSR-0101564
  modified_base 1: mod_base = OTHER; note = 6-aminohexanol linked by phosphate to the 5' end of 2-O-methylribose adenine
  modified_base 1..2: mod_base = OTHER; note = phosphorothioate
  modified_base 2: mod_base = OTHER; note = 2-O-methylribose adenine
  modified_base 3: mod_base = OTHER; note = 2-fluororibose guanine
  modified_base 4: mod_base = um
  modified_base 5: mod_base = OTHER; note = 2-fluororibose cytosine
  modified_base 6: mod_base = um
  modified_base 7: mod_base = OTHER; note = 2-fluororibose guanine
  modified_base 8: mod_base = OTHER; note = 2-fluororibose adenine
  modified_base 9: mod_base = OTHER; note = 2-fluororibose uracil
  modified_base 10: mod_base = OTHER; note = 2-O-methylribose adenine
  modified_base 11: mod_base = OTHER; note = 2-fluororibose guanine
  modified_base 12: mod_base = OTHER; note = 2-O-methylribose adenine
  modified_base 13: mod_base = OTHER; note = 2-fluororibose uracil
  modified_base 14: mod_base = gm
  modified_base 15: mod_base = OTHER; note = 2-fluororibose guanine
  modified_base 16: mod_base = OTHER; note = 2-O-methylribose adenine
  modified_base 17: mod_base = OTHER; note = 2-fluororibose adenine
  modified_base 18: mod_base = um
  modified_base 18..19: mod_base = OTHER; note = phosphorothioate
  modified_base 19: mod_base = OTHER; note = 2-fluororibose adenine
  source 1..19: mol_type = other RNA
aagtctgatagatggaata

SEQ ID NO: 425 - RNA, 19 nt, synthetic construct
  misc_feature 1..19: note = Synthetic: WV-41071
  misc_feature 1..19: note = Synthetic: SSR-0101565
  modified_base 1: mod_base = OTHER; note = 6-aminohexanol linked by phosphate to the 5' end of 2-O-methylribose guanine
  modified_base 1..2: mod_base = OTHER; note = phosphorothioate
  modified_base 2: mod_base = gm
  modified_base 3: mod_base = OTHER; note = 2-fluororibose adenine
  modified_base 4: mod_base = OTHER; note = 2-O-methylribose adenine
  modified_base 5: mod_base = OTHER; note = 2-fluororibose adenine
  modified_base 6: mod_base = OTHER; note = 2-O-methylribose adenine
  modified_base 7: mod_base = OTHER; note = 2-fluororibose adenine
  modified_base 8: mod_base = OTHER; note = 2-fluororibose cytosine
  modified_base 9: mod_base = OTHER; note = 2-fluororibose uracil
  modified_base 10: mod_base = gm
  modified_base 11: mod_base = OTHER; note = 2-fluororibose guanine
  modified_base 12: mod_base = um
  modified_base 13: mod_base = OTHER; note = 2-fluororibose adenine
  modified_base 14: mod_base = um
  modified_base 15: mod_base = OTHER; note = 2-fluororibose cytosine
  modified_base 16: mod_base = OTHER; note = 2-O-methylribose adenine
  modified_base 17: mod_base = OTHER; note = 2-fluororibose adenine
  modified_base 18: mod_base = OTHER; note = 2-O-methylribose adenine
  modified_base 18..19: mod_base = OTHER; note = phosphorothioate
  modified_base 19: mod_base = OTHER; note = 2-fluororibose adenine
  source 1..19: mol_type = other RNA
ggaaaaactggtatcaaaa

SEQ ID NO: 426 - RNA, 19 nt, synthetic construct
  misc_feature 1..19: note = Synthetic: WV-41072
  misc_feature 1..19: note = Synthetic: SSR-0101566
  modified_base 1: mod_base = OTHER; note = 6-aminohexanol linked by phosphate to the 5' end of 2-O-methylribose cytosine
  modified_base 1..2: mod_base = OTHER; note = phosphorothioate
  modified_base 2: mod_base = OTHER; note = 2-O-methylribose adenine
  modified_base 3: mod_base = OTHER; note = 2-fluororibose adenine
  modified_base 4: mod_base = gm
  modified_base 5: mod_base = OTHER; note = 2-fluororibose adenine
  modified_base 6: mod_base = um
  modified_base 7: mod_base = OTHER; note = 2-fluororibose uracil
  modified_base 8: mod_base = OTHER; note = 2-fluororibose adenine
  modified_base 9: mod_base = OTHER; note = 2-fluororibose uracil
  modified_base 10: mod_base = gm
  modified_base 11: mod_base = OTHER; note = 2-fluororibose guanine
  modified_base 12: mod_base = cm
  modified_base 13: mod_base = OTHER; note = 2-fluororibose cytosine
  modified_base 14: mod_base = um
  modified_base 15: mod_base = OTHER; note = 2-fluororibose guanine
  modified_base 16: mod_base = um
  modified_base 17: mod_base = OTHER; note = 2-fluororibose adenine
  modified_base 18: mod_base = um
  modified_base 18..19: mod_base = OTHER; note = phosphorothioate
  modified_base 19: mod_base = OTHER; note = 2-fluororibose adenine
  source 1..19: mol_type = other RNA
caagattatggcctgtata

SEQ ID NO: 427 - RNA, 19 nt, synthetic construct
  misc_feature 1..19: note = Synthetic: WV-41073
  misc_feature 1..19: note = Synthetic: SSR-0101567
  modified_base 1: mod_base = OTHER; note = 6-aminohexanol linked by phosphate to the 5' end of 2-O-methylribose guanine
  modified_base 1..2: mod_base = OTHER; note = phosphorothioate
  modified_base 2: mod_base = gm
  modified_base 3: mod_base = OTHER; note = 2-fluororibose adenine
  modified_base 4: mod_base = um
  modified_base 5: mod_base = OTHER; note = 2-fluororibose cytosine
  modified_base 6: mod_base = OTHER; note = 2-O-methylribose adenine
  modified_base 7: mod_base = OTHER; note = 2-fluororibose cytosine
  modified_base 8: mod_base = OTHER; note = 2-fluororibose adenine
  modified_base 9: mod_base = OTHER; note = 2-fluororibose adenine
  modified_base 10: mod_base = OTHER; note = 2-O-methylribose adenine
  modified_base 11: mod_base = OTHER; note = 2-fluororibose adenine
  modified_base 12: mod_base = gm
  modified_base 13: mod_base = OTHER; note = 2-fluororibose cytosine
  modified_base 14: mod_base = OTHER; note = 2-O-methylribose adenine
  modified_base 15: mod_base = OTHER; note = 2-fluororibose cytosine
  modified_base 16: mod_base = um
  modified_base 17: mod_base = OTHER; note = 2-fluororibose uracil
  modified_base 18: mod_base = cm
  modified_base 18..19: mod_base = OTHER; note = phosphorothioate
  modified_base 19: mod_base = OTHER; note = 2-fluororibose adenine
  source 1..19: mol_type = other RNA
ggatcacaaaagcacttca

SEQ ID NO: 428 - RNA, 19 nt, synthetic construct
  misc_feature 1..19: note = Synthetic: WV-41074
  misc_feature 1..19: note = Synthetic: SSR-0101568
  modified_base 1: mod_base = OTHER; note = 6-aminohexanol linked by phosphate to the 5' end of 2-O-methylribose cytosine
  modified_base 1..2: mod_base = OTHER; note = phosphorothioate
  modified_base 2: mod_base = OTHER; note = 2-O-methylribose adenine
  modified_base 3: mod_base = OTHER; note = 2-fluororibose adenine
  modified_base 4: mod_base = um
  modified_base 5: mod_base = OTHER; note = 2-fluororibose adenine
  modified_base 6: mod_base = OTHER; note = 2-O-methylribose adenine
  modified_base 7: mod_base = OTHER; note = 2-fluororibose guanine
  modified_base 8: mod_base = OTHER; note = 2-fluororibose adenine
  modified_base 9: mod_base = OTHER; note = 2-fluororibose adenine
  modified_base 10: mod_base = OTHER; note = 2-O-methylribose adenine
  modified_base 11: mod_base = OTHER; note = 2-fluororibose adenine
  modified_base 12: mod_base = um
  modified_base 13: mod_base = OTHER; note = 2-fluororibose guanine
  modified_base 14: mod_base = OTHER; note = 2-O-methylribose adenine
  modified_base 15: mod_base = OTHER; note = 2-fluororibose uracil
  modified_base 16: mod_base = um
  modified_base 17: mod_base = OTHER; note = 2-fluororibose uracil
  modified_base 18: mod_base = um
  modified_base 18..19: mod_base = OTHER; note = phosphorothioate
  modified_base 19: mod_base = OTHER; note = 2-fluororibose adenine
  source 1..19: mol_type = other RNA
caataagaaaatgatttta

SEQ ID NO: 429 - RNA, 19 nt, synthetic construct
  misc_feature 1..19: note = Synthetic: WV-41075
  misc_feature 1..19: note = Synthetic: SSR-0101569
  modified_base 1: mod_base = OTHER; note = 6-aminohexanol linked by phosphate to the 5' end of 2-O-methylribose cytosine
  modified_base 1..2: mod_base = OTHER; note = phosphorothioate
  modified_base 2: mod_base = cm
  modified_base 3: mod_base = OTHER; note = 2-fluororibose adenine
  modified_base 4: mod_base = um
  modified_base 5: mod_base = OTHER; note = 2-fluororibose adenine
  modified_base 6: mod_base = um
  modified_base 7: mod_base = OTHER; note = 2-fluororibose uracil
  modified_base 8: mod_base = OTHER; note = 2-fluororibose guanine
  modified_base 9: mod_base = OTHER; note = 2-fluororibose uracil
  modified_base 10: mod_base = um
  modified_base 11: mod_base = OTHER; note = 2-fluororibose cytosine
  modified_base 12: mod_base = cm
  modified_base 13: mod_base = OTHER; note = 2-fluororibose adenine
  modified_base 14: mod_base = gm
  modified_base 15: mod_base = OTHER; note = 2-fluororibose cytosine
  modified_base 16: mod_base = OTHER; note = 2-O-methylribose adenine
  modified_base 17: mod_base = OTHER; note = 2-fluororibose adenine
  modified_base 18: mod_base = OTHER; note = 2-O-methylribose adenine
  modified_base 18..19: mod_base = OTHER; note = phosphorothioate
  modified_base 19: mod_base = OTHER; note = 2-fluororibose adenine
  source 1..19: mol_type = other RNA
ccatattgttccagcaaaa

SEQ ID NO: 430 - RNA, 19 nt, synthetic construct
  misc_feature 1..19: note = Synthetic: WV-41076
  misc_feature 1..19: note = Synthetic: SSR-0101570
  modified_base 1: mod_base = OTHER; note = 6-aminohexanol linked by phosphate to the 5' end of 2-O-methylribose uracil
  modified_base 1..2: mod_base = OTHER; note = phosphorothioate
  modified_base 2: mod_base = OTHER; note = 2-O-methylribose adenine
  modified_base 3: mod_base = OTHER; note = 2-fluororibose guanine
  modified_base 4: mod_base = OTHER; note = 2-O-methylribose adenine
  modified_base 5: mod_base = OTHER; note = 2-fluororibose uracil
  modified_base 6: mod_base = gm
  modified_base 7: mod_base = OTHER; note = 2-fluororibose guanine
  modified_base 8: mod_base = OTHER; note = 2-fluororibose adenine
  modified_base 9: mod_base = OTHER; note = 2-fluororibose adenine
  modified_base 10: mod_base = um
  modified_base 11: mod_base = OTHER; note = 2-fluororibose adenine
  modified_base 12: mod_base = cm
  modified_base 13: mod_base = OTHER; note = 2-fluororibose uracil
  modified_base 14: mod_base = um
  modified_base 15: mod_base = OTHER; note = 2-fluororibose adenine
  modified_base 16: mod_base = cm
  modified_base 17: mod_base = OTHER; note = 2-fluororibose cytosine
  modified_base 18: mod_base = OTHER; note = 2-O-methylribose adenine
  modified_base 18..19: mod_base = OTHER; note = phosphorothioate
  modified_base 19: mod_base = OTHER; note = 2-fluororibose adenine
  source 1..19: mol_type = other RNA
tagatggaatacttaccaa

SEQ ID NO: 431 - RNA, 19 nt, synthetic construct
  misc_feature 1..19: note = Synthetic: WV-41077
  misc_feature 1..19: note = Synthetic: SSR-0101571
  modified_base 1: mod_base = OTHER; note = 6-aminohexanol linked by phosphate to the 5' end of 2-O-methylribose adenine
  modified_base 1..2: mod_base = OTHER; note = phosphorothioate
  modified_base 2: mod_base = cm
  modified_base 3: mod_base = OTHER; note = 2-fluororibose adenine
  modified_base 4: mod_base = OTHER; note = 2-O-methylribose adenine
  modified_base 5: mod_base = OTHER; note = 2-fluororibose guanine
  modified_base 6: mod_base = OTHER; note = 2-O-methylribose adenine
  modified_base 7: mod_base = OTHER; note = 2-fluororibose uracil
  modified_base 8: mod_base = OTHER; note = 2-fluororibose uracil
  modified_base 9: mod_base = OTHER; note = 2-fluororibose adenine
  modified_base 10: mod_base = um
  modified_base 11: mod_base = OTHER; note = 2-fluororibose guanine
  modified_base 12: mod_base = gm
  modified_base 13: mod_base = OTHER; note = 2-fluororibose cytosine
  modified_base 14: mod_base = cm
  modified_base 15: mod_base = OTHER; note = 2-fluororibose uracil
  modified_base 16: mod_base = gm
  modified_base 17: mod_base = OTHER; note = 2-fluororibose uracil
  modified_base 18: mod_base = OTHER; note = 2-O-methylribose adenine
  modified_base 18..19: mod_base = OTHER; note = phosphorothioate
  modified_base 19: mod_base = OTHER; note = 2-fluororibose adenine
  source 1..19: mol_type = other RNA
acaagattatggcctgtaa

SEQ ID NO: 432 - RNA, 19 nt, synthetic construct
  misc_feature 1..19: note = Synthetic: WV-41078
  misc_feature 1..19: note = Synthetic: SSR-0101572
  modified_base 1: mod_base = OTHER; note = 6-aminohexanol linked by phosphate to the 5' end of 2-O-methylribose cytosine
  modified_base 1..2: mod_base = OTHER; note = phosphorothioate
  modified_base 2: mod_base = cm
  modified_base 3: mod_base = OTHER; note = 2-fluororibose cytosine
  modified_base 4: mod_base = OTHER; note = 2-O-methylribose adenine
  modified_base 5: mod_base = OTHER; note = 2-fluororibose uracil
  modified_base 6: mod_base = OTHER; note = 2-O-methylribose adenine
  modified_base 7: mod_base = OTHER; note = 2-fluororibose uracil
  modified_base 8: mod_base = OTHER; note = 2-fluororibose uracil
  modified_base 9: mod_base = OTHER; note = 2-fluororibose guanine
  modified_base 10: mod_base = um
  modified_base 11: mod_base = OTHER; note = 2-fluororibose uracil
  modified_base 12: mod_base = cm
  modified_base 13: mod_base = OTHER; note = 2-fluororibose cytosine
  modified_base 14: mod_base = OTHER; note = 2-O-methylribose adenine
  modified_base 15: mod_base = OTHER; note = 2-fluororibose guanine
  modified_base 16: mod_base = cm
  modified_base 17: mod_base = OTHER; note = 2-fluororibose adenine
  modified_base 18: mod_base = OTHER; note = 2-O-methylribose adenine
  modified_base 18..19: mod_base = OTHER; note = phosphorothioate
  modified_base 19: mod_base = OTHER; note = 2-fluororibose adenine
  source 1..19: mol_type = other RNA
cccatattgttccagcaaa

SEQ ID NO: 433 - RNA, 19 nt, synthetic construct
  misc_feature 1..19: note = Synthetic: WV-41079
  misc_feature 1..19: note = Synthetic: SSR-0101573
  modified_base 1: mod_base = OTHER; note = 6-aminohexanol linked by phosphate to the 5' end of 2-O-methylribose adenine
  modified_base 1..2: mod_base = OTHER; note = phosphorothioate
  modified_base 2: mod_base = cm
  modified_base 3: mod_base = OTHER; note = 2-fluororibose adenine
  modified_base 4: mod_base = gm
  modified_base 5: mod_base = OTHER; note = 2-fluororibose adenine
  modified_base 6: mod_base = um
  modified_base 7: mod_base = OTHER; note = 2-fluororibose guanine
  modified_base 8: mod_base = OTHER; note = 2-fluororibose adenine
  modified_base 9: mod_base = OTHER; note = 2-fluororibose adenine
  modified_base 10: mod_base = gm
  modified_base 11: mod_base = OTHER; note = 2-fluororibose uracil
  modified_base 12: mod_base = cm
  modified_base 13: mod_base = OTHER; note = 2-fluororibose guanine
  modified_base 14: mod_base = um
  modified_base 15: mod_base = OTHER; note = 2-fluororibose adenine
  modified_base 16: mod_base = OTHER; note = 2-O-methylribose adenine
  modified_base 17: mod_base = OTHER; note = 2-fluororibose guanine
  modified_base 18: mod_base = OTHER; note = 2-O-methylribose adenine
  modified_base 18..19: mod_base = OTHER; note = phosphorothioate
  modified_base 19: mod_base = OTHER; note = 2-fluororibose adenine
  source 1..19: mol_type = other RNA
acagatgaagtcgtaagaa

SEQ ID NO: 434 - RNA, 19 nt, synthetic construct
  misc_feature 1..19: note = Synthetic: WV-41080
  misc_feature 1..19: note = Synthetic: SSR-0101574
  modified_base 1: mod_base = OTHER; note = 6-aminohexanol linked by phosphate to the 5' end of 2-O-methylribose uracil
  modified_base 1..2: mod_base = OTHER; note = phosphorothioate
  modified_base 2: mod_base = gm
  modified_base 3: mod_base = OTHER; note = 2-fluororibose uracil
  modified_base 4: mod_base = OTHER; note = 2-O-methylribose adenine
  modified_base 5: mod_base = OTHER; note = 2-fluororibose uracil
  modified_base 6: mod_base = um
  modified_base 7: mod_base = OTHER; note = 2-fluororibose guanine
  modified_base 8: mod_base = OTHER; note = 2-fluororibose guanine
  modified_base 9: mod_base = OTHER; note = 2-fluororibose adenine
  modified_base 10: mod_base = gm
  modified_base 11: mod_base = OTHER; note = 2-fluororibose adenine
  modified_base 12: mod_base = cm
  modified_base 13: mod_base = OTHER; note = 2-fluororibose adenine
  modified_base 14: mod_base = gm
  modified_base 15: mod_base = OTHER; note = 2-fluororibose adenine
  modified_base 16: mod_base = um
  modified_base 17: mod_base = OTHER; note = 2-fluororibose guanine
  modified_base 18: mod_base = OTHER; note = 2-O-methylribose adenine
  modified_base 18..19: mod_base = OTHER; note = phosphorothioate
  modified_base 19: mod_base = OTHER; note = 2-fluororibose adenine
  source 1..19: mol_type = other RNA
tgtattggagacagatgaa

SEQ ID NO: 435 - RNA, 19 nt, synthetic construct
  misc_feature 1..19: note = Synthetic: WV-41081
  misc_feature 1..19: note = Synthetic: SSR-0101575
  modified_base 1: mod_base = OTHER; note = 6-aminohexanol linked by phosphate to the 5' end of 2-O-methylribose cytosine
  modified_base 1..2: mod_base = OTHER; note = phosphorothioate
  modified_base 2: mod_base = OTHER; note = 2-O-methylribose adenine
  modified_base 3: mod_base = OTHER; note = 2-fluororibose cytosine
  modified_base 4: mod_base = OTHER; note = 2-O-methylribose adenine
  modified_base 5: mod_base = OTHER; note = 2-fluororibose adenine
  modified_base 6: mod_base = gm
  modified_base 7: mod_base = OTHER; note = 2-fluororibose adenine
  modified_base 8: mod_base = OTHER; note = 2-fluororibose uracil
  modified_base 9: mod_base = OTHER; note = 2-fluororibose uracil
  modified_base 10: mod_base = OTHER; note = 2-O-methylribose adenine
  modified_base 11: mod_base = OTHER; note = 2-fluororibose uracil
  modified_base 12: mod_base = gm
  modified_base 13: mod_base = OTHER; note = 2-fluororibose guanine
  modified_base 14: mod_base = cm
  modified_base 15: mod_base = OTHER; note = 2-fluororibose cytosine
  modified_base 16: mod_base = um
  modified_base 17: mod_base = OTHER; note = 2-fluororibose guanine
  modified_base 18: mod_base = um
  modified_base 18..19: mod_base = OTHER; note = phosphorothioate
  modified_base 19: mod_base = OTHER; note = 2-fluororibose adenine
  source 1..19: mol_type = other RNA
cacaagattatggcctgta

SEQ ID NO: 436 - RNA, 19 nt, synthetic construct
  misc_feature 1..19: note = Synthetic: WV-41082
  misc_feature 1..19: note = Synthetic: SSR-0101576
  modified_base 1: mod_base = OTHER; note = 6-aminohexanol linked by phosphate to the 5' end of 2-O-methylribose guanine
  modified_base 1..2: mod_base = OTHER; note = phosphorothioate
  modified_base 2: mod_base = OTHER; note = 2-O-methylribose adenine
  modified_base 3: mod_base = OTHER; note = 2-fluororibose adenine
  modified_base 4: mod_base = gm
  modified_base 5: mod_base = OTHER; note = 2-fluororibose uracil
  modified_base 6: mod_base = cm
  modified_base 7: mod_base = OTHER; note = 2-fluororibose guanine
  modified_base 8: mod_base = OTHER; note = 2-fluororibose uracil
  modified_base 9: mod_base = OTHER; note = 2-fluororibose adenine
  modified_base 10: mod_base = OTHER; note = 2-O-methylribose adenine
  modified_base 11: mod_base = OTHER; note = 2-fluororibose guanine
  modified_base 12: mod_base = OTHER; note = 2-O-methylribose adenine
  modified_base 13: mod_base = OTHER; note = 2-fluororibose adenine
  modified_base 14: mod_base = gm
  modified_base 15: mod_base = OTHER; note = 2-fluororibose uracil
  modified_base 16: mod_base = cm
  modified_base 17: mod_base = OTHER; note = 2-fluororibose uracil
  modified_base 18: mod_base = gm
  modified_base 18..19: mod_base = OTHER; note = phosphorothioate
  modified_base 19: mod_base = OTHER; note = 2-fluororibose adenine
  source 1..19: mol_type = other RNA
gaagtcgtaagaagtctga

SEQ ID NO: 437 - RNA, 19 nt, synthetic construct
  misc_feature 1..19: note = Synthetic: WV-41083
  misc_feature 1..19: note = Synthetic: SSR-0101577
  modified_base 1: mod_base = OTHER; note = 6-aminohexanol linked by phosphate to the 5' end of 2-O-methylribose guanine
  modified_base 1..2: mod_base = OTHER; note = phosphorothioate
  modified_base 2: mod_base = um
  modified_base 3: mod_base = OTHER; note = 2-fluororibose adenine
  modified_base 4: mod_base = um
  modified_base 5: mod_base = OTHER; note = 2-fluororibose cytosine
  modified_base 6: mod_base = OTHER; note = 2-O-methylribose adenine
  modified_base 7: mod_base = OTHER; note = 2-fluororibose adenine
  modified_base 8: mod_base = OTHER; note = 2-fluororibose adenine
  modified_base 9: mod_base = OTHER; note = 2-fluororibose adenine
  modified_base 10: mod_base = cm
  modified_base 11: mod_base = OTHER; note = 2-fluororibose cytosine
  modified_base 12: mod_base = um
  modified_base 13: mod_base = OTHER; note = 2-fluororibose cytosine
  modified_base 14: mod_base = OTHER; note = 2-O-methylribose adenine
  modified_base 15: mod_base = OTHER; note = 2-fluororibose uracil
  modified_base 16: mod_base = gm
  modified_base 17: mod_base = OTHER; note = 2-fluororibose uracil
  modified_base 18: mod_base = cm
  modified_base 18..19: mod_base = OTHER; note = phosphorothioate
  modified_base 19: mod_base = OTHER; note = 2-fluororibose adenine
  source 1..19: mol_type = other RNA
gtatcaaaacctcatgtca

SEQ ID NO: 438 - RNA, 19 nt, synthetic construct
  misc_feature 1..19: note = Synthetic: WV-41084
  misc_feature 1..19: note = Synthetic: SSR-0101578
  modified_base 1: mod_base = OTHER; note = 6-aminohexanol linked by phosphate to the 5' end of 2-O-methylribose guanine
  modified_base 1..2: mod_base = OTHER; note = phosphorothioate
  modified_base 2: mod_base = OTHER; note = 2-O-methylribose adenine
  modified_base 3: mod_base = OTHER; note = 2-fluororibose adenine
  modified_base 4: mod_base = um
  modified_base 5: mod_base = OTHER; note = 2-fluororibose adenine
  modified_base 6: mod_base = cm
  modified_base 7: mod_base = OTHER; note = 2-fluororibose uracil
  modified_base 8: mod_base = OTHER; note = 2-fluororibose uracil
  modified_base 9: mod_base = OTHER; note = 2-fluororibose adenine
  modified_base 10: mod_base = cm
  modified_base 11: mod_base = OTHER; note = 2-fluororibose cytosine
  modified_base 12: mod_base = OTHER; note = 2-O-methylribose adenine
  modified_base 13: mod_base = OTHER; note = 2-fluororibose adenine
  modified_base 14: mod_base = um
  modified_base 15: mod_base = OTHER; note = 2-fluororibose adenine
  modified_base 16: mod_base = OTHER; note = 2-O-methylribose adenine
  modified_base 17: mod_base = OTHER; note = 2-fluororibose guanine
  modified_base 18: mod_base = OTHER; note = 2-O-methylribose adenine
  modified_base 18..19: mod_base = OTHER; note = phosphorothioate
  modified_base 19: mod_base = OTHER; note = 2-fluororibose adenine
  source 1..19: mol_type = other RNA
gaatacttaccaataagaa

SEQ ID NO: 439 - RNA, 19 nt, synthetic construct
  misc_feature 1..19: note = Synthetic: WV-41085
  misc_feature 1..19: note = Synthetic: SSR-0101579
  modified_base 1: mod_base = OTHER; note = 6-aminohexanol linked by phosphate to the 5' end of 2-O-methylribose adenine
  modified_base 1..2: mod_base = OTHER; note = phosphorothioate
  modified_base 2: mod_base = gm
  modified_base 3: mod_base = OTHER; note = 2-fluororibose adenine
  modified_base 4: mod_base = OTHER; note = 2-O-methylribose adenine
  modified_base 5: mod_base = OTHER; note = 2-fluororibose guanine
  modified_base 6: mod_base = um
  modified_base 7: mod_base = OTHER; note = 2-fluororibose cytosine
  modified_base 8: mod_base = OTHER; note = 2-fluororibose uracil
  modified_base 9: mod_base = OTHER; note = 2-fluororibose guanine
  modified_base 10: mod_base = OTHER; note = 2-O-methylribose adenine
  modified_base 11: mod_base = OTHER; note = 2-fluororibose uracil
  modified_base 12: mod_base = OTHER; note = 2-O-methylribose adenine
  modified_base 13: mod_base = OTHER; note = 2-fluororibose guanine
  modified_base 14: mod_base = OTHER; note = 2-O-methylribose adenine
  modified_base 15: mod_base = OTHER; note = 2-fluororibose uracil
  modified_base 16: mod_base = gm
  modified_base 17: mod_base = OTHER; note = 2-fluororibose guanine
  modified_base 18: mod_base = OTHER; note = 2-O-methylribose adenine
  modified_base 18..19: mod_base = OTHER; note = phosphorothioate
  modified_base 19: mod_base = OTHER; note = 2-fluororibose adenine
  source 1..19: mol_type = other RNA
agaagtctgatagatggaa

SEQ ID NO: 440 - RNA, 19 nt, synthetic construct
  misc_feature 1..19: note = Synthetic: WV-41086
  misc_feature 1..19: note = Synthetic: SSR-0101580
  modified_base 1: mod_base = OTHER; note = 6-aminohexanol linked by phosphate to the 5' end of 2-O-methylribose adenine
  modified_base 1..2: mod_base = OTHER; note = phosphorothioate
  modified_base 2: mod_base = um
  modified_base 3: mod_base = OTHER; note = 2-fluororibose guanine
  modified_base 4: mod_base = gm
  modified_base 5: mod_base = OTHER; note = 2-fluororibose adenine
  modified_base 6: mod_base = OTHER; note = 2-O-methylribose adenine
  modified_base 7: mod_base = OTHER; note = 2-fluororibose uracil
  modified_base 8: mod_base = OTHER; note = 2-fluororibose adenine
  modified_base 9: mod_base = OTHER; note = 2-fluororibose cytosine
  modified_base 10: mod_base = um
  modified_base 11: mod_base = OTHER; note = 2-fluororibose uracil
  modified_base 12: mod_base = OTHER; note = 2-O-methylribose adenine
  modified_base 13: mod_base = OTHER; note = 2-fluororibose cytosine
  modified_base 14: mod_base = cm
  modified_base 15: mod_base = OTHER; note = 2-fluororibose adenine
  modified_base 16: mod_base = OTHER; note = 2-O-methylribose adenine
  modified_base 17: mod_base = OTHER; note = 2-fluororibose uracil
  modified_base 18: mod_base = OTHER; note = 2-O-methylribose adenine
  modified_base 18..19: mod_base = OTHER; note = phosphorothioate
  modified_base 19: mod_base = OTHER; note = 2-fluororibose adenine
  source 1..19: mol_type = other RNA
atggaatacttaccaataa

SEQ ID NO: 441 - RNA, 19 nt, synthetic construct
  misc_feature 1..19: note = Synthetic: WV-41087
  misc_feature 1..19: note = Synthetic: SSR-0101581
  modified_base 1: mod_base = OTHER; note = 6-aminohexanol linked by phosphate to the 5' end of 2-O-methylribose guanine
  modified_base 1..2: mod_base = OTHER; note = phosphorothioate
  modified_base 2: mod_base = gm
  modified_base 3: mod_base = OTHER; note = 2-fluororibose cytosine
  modified_base 4: mod_base = cm
  modified_base 5: mod_base = OTHER; note = 2-fluororibose uracil
  modified_base 6: mod_base = gm
  modified_base 7: mod_base = OTHER; note = 2-fluororibose uracil
  modified_base 8: mod_base = OTHER; note = 2-fluororibose adenine
  modified_base 9: mod_base = OTHER; note = 2-fluororibose uracil
  modified_base 10: mod_base = um
  modified_base 11: mod_base = OTHER; note = 2-fluororibose guanine
  modified_base 12: mod_base = gm
  modified_base 13: mod_base = OTHER; note = 2-fluororibose adenine
  modified_base 14: mod_base = gm
  modified_base 15: mod_base = OTHER; note = 2-fluororibose adenine
  modified_base 16: mod_base = cm
  modified_base 17: mod_base = OTHER; note = 2-fluororibose adenine
  modified_base 18: mod_base = gm
  modified_base 18..19: mod_base = OTHER; note = phosphorothioate
  modified_base 19: mod_base = OTHER; note = 2-fluororibose adenine
  source 1..19: mol_type = other RNA
ggcctgtattggagacaga

SEQ ID NO: 442 - RNA, 19 nt, synthetic construct
  misc_feature 1..19: note = Synthetic: WV-41088
  misc_feature 1..19: note = Synthetic: SSR-0101582
  modified_base 1: mod_base = OTHER; note = 6-aminohexanol linked by phosphate to the 5' end of 2-O-methylribose guanine
  modified_base 1..2: mod_base = OTHER; note = phosphorothioate
  modified_base 2: mod_base = gm
  modified_base 3: mod_base = OTHER; note = 2-fluororibose guanine
  modified_base 4: mod_base = um
  modified_base 5: mod_base = OTHER; note = 2-fluororibose uracil
  modified_base 6: mod_base = cm
  modified_base 7: mod_base = OTHER; note = 2-fluororibose adenine
  modified_base 8: mod_base = OTHER; note = 2-fluororibose cytosine
  modified_base 9: mod_base = OTHER; note = 2-fluororibose cytosine
  modified_base 10: mod_base = OTHER; note = 2-O-methylribose adenine
  modified_base 11: mod_base = OTHER; note = 2-fluororibose adenine
  modified_base 12: mod_base = OTHER; note = 2-O-methylribose adenine
  modified_base 13: mod_base = OTHER; note = 2-fluororibose adenine
  modified_base 14: mod_base = OTHER; note = 2-O-methylribose adenine
  modified_base 15: mod_base = OTHER; note = 2-fluororibose uracil
  modified_base 16: mod_base = cm
  modified_base 17: mod_base = OTHER; note = 2-fluororibose cytosine
  modified_base 18: mod_base = OTHER; note = 2-O-methylribose adenine
  modified_base 18..19: mod_base = OTHER; note = phosphorothioate
  modified_base 19: mod_base = OTHER; note = 2-fluororibose adenine
  source 1..19: mol_type = other RNA
gggttcaccaaaaatccaa

SEQ ID NO: 443 - RNA, 19 nt, synthetic construct
  misc_feature 1..19: note = Synthetic: WV-41089
  misc_feature 1..19: note = Synthetic: SSR-0101583
  modified_base 1: mod_base = OTHER; note = 6-aminohexanol linked by phosphate to the 5' end of 2-O-methylribose guanine
  modified_base 1..2: mod_base = OTHER; note = phosphorothioate
  modified_base 2: mod_base = OTHER; note = 2-O-methylribose adenine
  modified_base 3: mod_base = OTHER; note = 2-fluororibose cytosine
  modified_base 4: mod_base = OTHER; note = 2-O-methylribose adenine
  modified_base 5: mod_base = OTHER; note = 2-fluororibose guanine
  modified_base 6: mod_base = OTHER; note = 2-O-methylribose adenine
  modified_base 7: mod_base = OTHER; note = 2-fluororibose uracil
  modified_base 8: mod_base = OTHER; note = 2-fluororibose guanine
  modified_base 9: mod_base = OTHER; note = 2-fluororibose adenine
  modified_base 10: mod_base = OTHER; note = 2-O-methylribose adenine
  modified_base 11: mod_base = OTHER; note = 2-fluororibose guanine
  modified_base 12: mod_base = um
  modified_base 13: mod_base = OTHER; note = 2-fluororibose cytosine
  modified_base 14: mod_base = gm
  modified_base 15: mod_base = OTHER; note = 2-fluororibose uracil
  modified_base 16: mod_base = OTHER; note = 2-O-methylribose adenine
  modified_base 17: mod_base = OTHER; note = 2-fluororibose adenine
  modified_base 18: mod_base = gm
  modified_base 18..19: mod_base = OTHER; note = phosphorothioate
  modified_base 19: mod_base = OTHER; note = 2-fluororibose adenine
  source 1..19: mol_type = other RNA
gacagatgaagtcgtaaga

SEQ ID NO: 444 - RNA, 19 nt, synthetic construct
  misc_feature 1..19: note = Synthetic: WV-41090
  misc_feature 1..19: note = Synthetic: SSR-0101584
  modified_base 1: mod_base = OTHER; note = 6-aminohexanol linked by phosphate to the 5' end of 2-O-methylribose cytosine
  modified_base 1..2: mod_base = OTHER; note = phosphorothioate
  modified_base 2: mod_base = um
  modified_base 3: mod_base = OTHER; note = 2-fluororibose guanine
  modified_base 4: mod_base = OTHER; note = 2-O-methylribose adenine
  modified_base 5: mod_base = OTHER; note = 2-fluororibose uracil
  modified_base 6: mod_base = OTHER; note = 2-O-methylribose adenine
  modified_base 7: mod_base = OTHER; note = 2-fluororibose guanine
  modified_base 8: mod_base = OTHER; note = 2-fluororibose adenine
  modified_base 9: mod_base = OTHER; note = 2-fluororibose uracil
  modified_base 10: mod_base = gm
  modified_base 11: mod_base = OTHER; note = 2-fluororibose guanine
  modified_base 12: mod_base = OTHER; note = 2-O-methylribose adenine
  modified_base 13: mod_base = OTHER; note = 2-fluororibose adenine
  modified_base 14: mod_base = um
  modified_base 15: mod_base = OTHER; note = 2-fluororibose adenine
  modified_base 16: mod_base = cm
  modified_base 17: mod_base = OTHER; note = 2-fluororibose uracil
  modified_base 18: mod_base = um
  modified_base 18..19: mod_base = OTHER; note = phosphorothioate
  modified_base 19: mod_base = OTHER; note = 2-fluororibose adenine
  source 1..19: mol_type = other RNA
ctgatagatggaatactta

SEQ ID NO: 445 - RNA, 19 nt, synthetic construct
  misc_feature 1..19: note = Synthetic: WV-41091
  misc_feature 1..19: note = Synthetic: SSR-0101585
  modified_base 1: mod_base = OTHER; note = 6-aminohexanol linked by phosphate to the 5' end of 2-O-methylribose guanine
  modified_base 1..2: mod_base = OTHER; note = phosphorothioate
  modified_base 2: mod_base = OTHER; note = 2-O-methylribose adenine
  modified_base 3: mod_base = OTHER; note = 2-fluororibose uracil
  modified_base 4: mod_base = gm
  modified_base 5: mod_base = OTHER; note = 2-fluororibose uracil
  modified_base 6: mod_base = OTHER; note = 2-O-methylribose adenine
  modified_base 7: mod_base = OTHER; note = 2-fluororibose adenine
  modified_base 8: mod_base = OTHER; note = 2-fluororibose cytosine
  modified_base 9: mod_base = OTHER; note = 2-fluororibose adenine
  modified_base 10: mod_base = OTHER; note = 2-O-methylribose adenine
  modified_base 11: mod_base = OTHER; note = 2-fluororibose uracil
  modified_base 12: mod_base = cm
  modified_base 13: mod_base = OTHER; note = 2-fluororibose guanine
  modified_base 14: mod_base = um
  modified_base 15: mod_base = OTHER; note = 2-fluororibose guanine
  modified_base 16: mod_base = gm
  modified_base 17: mod_base = OTHER; note = 2-fluororibose uracil
  modified_base 18: mod_base = gm
  modified_base 18..19: mod_base = OTHER; note = phosphorothioate
  modified_base 19: mod_base = OTHER; note = 2-fluororibose adenine
  source 1..19: mol_type = other RNA
gatgtaacaatcgtggtga

SEQ ID NO: 446 - RNA, 19 nt, synthetic construct
  misc_feature 1..19: note = Synthetic: WV-41092
  misc_feature 1..19: note = Synthetic: SSR-0101586
  modified_base 1: mod_base = OTHER; note = 6-aminohexanol linked by phosphate to the 5' end of 2-O-methylribose adenine
  modified_base 1..2: mod_base = OTHER; note = phosphorothioate
  modified_base 2: mod_base = gm
  modified_base 3: mod_base = OTHER; note = 2-fluororibose adenine
  modified_base 4: mod_base = OTHER; note = 2-O-methylribose adenine
  modified_base 5: mod_base = OTHER; note = 2-fluororibose guanine
  modified_base 6: mod_base = um
  modified_base 7: mod_base = OTHER; note = 2-fluororibose guanine
  modified_base 8: mod_base = OTHER; note = 2-fluororibose guanine
  modified_base 9: mod_base = OTHER; note = 2-fluororibose guanine
  modified_base 10: mod_base = um
  modified_base 11: mod_base = OTHER; note = 2-fluororibose guanine
  modified_base 12: mod_base = OTHER; note = 2-O-methylribose adenine
  modified_base 13: mod_base = OTHER; note = 2-fluororibose uracil
  modified_base 14: mod_base = gm
  modified_base 15: mod_base = OTHER; note = 2-fluororibose uracil
  modified_base 16: mod_base = OTHER; note = 2-O-methylribose adenine
  modified_base 17: mod_base = OTHER; note = 2-fluororibose adenine
  modified_base 18: mod_base = cm
  modified_base 18..19: mod_base = OTHER; note = phosphorothioate
  modified_base 19: mod_base = OTHER; note = 2-fluororibose adenine
  source 1..19: mol_type = other RNA
agaagtgggtgatgtaaca

SEQ ID NO: 447 - RNA, 19 nt, synthetic construct
  misc_feature 1..19: note = Synthetic: WV-41093
  misc_feature 1..19: note = Synthetic: SSR-0101587
  modified_base 1: mod_base = OTHER; note = 6-aminohexanol linked by phosphate to the 5' end of 2-O-methylribose uracil
  modified_base 1..2: mod_base = OTHER; note = phosphorothioate
  modified_base 2: mod_base = OTHER; note = 2-O-methylribose adenine
  modified_base 3: mod_base = OTHER; note = 2-fluororibose adenine
  modified_base 4: mod_base = cm
  modified_base 5: mod_base = OTHER; note = 2-fluororibose adenine
  modified_base 6: mod_base = OTHER; note = 2-O-methylribose adenine
  modified_base 7: mod_base = OTHER; note = 2-fluororibose uracil
  modified_base 8: mod_base = OTHER; note = 2-fluororibose cytosine
  modified_base 9: mod_base = OTHER; note = 2-fluororibose guanine
  modified_base 10: mod_base = um
  modified_base 11: mod_base = OTHER; note = 2-fluororibose guanine
  modified_base 12: mod_base = gm
  modified_base 13: mod_base = OTHER; note = 2-fluororibose uracil
  modified_base 14: mod_base = gm
  modified_base 15: mod_base = OTHER; note = 2-fluororibose adenine
  modified_base 16: mod_base = OTHER; note = 2-O-methylribose adenine
  modified_base 17: mod_base = OTHER; note = 2-fluororibose uracil
  modified_base 18: mod_base = OTHER; note = 2-O-methylribose adenine
  modified_base 18..19: mod_base = OTHER; note = phosphorothioate
  modified_base 19: mod_base = OTHER; note = 2-fluororibose adenine
  source 1..19: mol_type = other RNA
taacaatcgtggtgaataa

SEQ ID NO: 448 - RNA, 19 nt, synthetic construct
  misc_feature 1..19: note = Synthetic: WV-41094
  misc_feature 1..19: note = Synthetic: SSR-0101588
  modified_base 1: mod_base = OTHER; note = 6-aminohexanol linked by phosphate to the 5' end of 2-O-methylribose cytosine
  modified_base 1..2: mod_base = OTHER; note = phosphorothioate
  modified_base 2: mod_base = um
  modified_base 3: mod_base = OTHER; note = 2-fluororibose adenine
  modified_base 4: mod_base = gm
  modified_base 5: mod_base = OTHER; note = 2-fluororibose guanine
  modified_base 6: mod_base = OTHER; note = 2-O-methylribose adenine
  modified_base 7: mod_base = OTHER; note = 2-fluororibose cytosine
  modified_base 8: mod_base = OTHER; note = 2-fluororibose adenine
  modified_base 9: mod_base = OTHER; note = 2-fluororibose uracil
  modified_base 10: mod_base = um
  modified_base 11: mod_base = OTHER; note = 2-fluororibose uracil
  modified_base 12: mod_base = um
  modified_base 13: mod_base = OTHER; note = 2-fluororibose uracil
  modified_base 14: mod_base = gm
  modified_base 15: mod_base = OTHER; note = 2-fluororibose guanine
  modified_base 16: mod_base = OTHER; note = 2-O-methylribose adenine
  modified_base 17: mod_base = OTHER; note = 2-fluororibose uracil
  modified_base 18: mod_base = cm
  modified_base 18..19: mod_base = OTHER; note = phosphorothioate
  modified_base 19: mod_base = OTHER; note = 2-fluororibose adenine
  source 1..19: mol_type = other RNA
ctaggacatttttggatca

SEQ ID NO: 449 - RNA, 19 nt, synthetic construct
  misc_feature 1..19: note = Synthetic: WV-41095
  misc_feature 1..19: note = Synthetic: SSR-0101589
  modified_base 1: mod_base = OTHER; note = 6-aminohexanol linked by phosphate to the 5' end of 2-O-methylribose guanine
  modified_base 1..2: mod_base = OTHER; note = phosphorothioate
  modified_base 2: mod_base = gm
  modified_base 3: mod_base = OTHER; note = 2-fluororibose adenine
  modified_base 4: mod_base = OTHER; note = 2-O-methylribose adenine
  modified_base 5: mod_base = OTHER; note = 2-fluororibose uracil
  modified_base 6: mod_base = OTHER; note = 2-O-methylribose adenine
  modified_base 7: mod_base = OTHER; note = 2-fluororibose cytosine
  modified_base 8: mod_base = OTHER; note = 2-fluororibose uracil
  modified_base 9: mod_base = OTHER; note = 2-fluororibose uracil
  modified_base 10: mod_base = OTHER; note = 2-O-methylribose adenine
  modified_base 11: mod_base = OTHER; note = 2-fluororibose cytosine
  modified_base 12: mod_base = cm
  modified_base 13: mod_base = OTHER; note = 2-fluororibose adenine
  modified_base 14: mod_base = OTHER; note = 2-O-methylribose adenine
  modified_base 15: mod_base = OTHER; note = 2-fluororibose uracil
  modified_base 16: mod_base = OTHER; note = 2-O-methylribose adenine
  modified_base 17: mod_base = OTHER; note = 2-fluororibose adenine
  modified_base 18: mod_base = gm
  modified_base 18..19: mod_base = OTHER; note = phosphorothioate
  modified_base 19: mod_base = OTHER; note = 2-fluororibose adenine
  source 1..19: mol_type = other RNA
ggaatacttaccaataaga

SEQ ID NO: 450 - RNA, 19 nt, synthetic construct
  misc_feature 1..19: note = Synthetic: WV-41096
  misc_feature 1..19: note = Synthetic: SSR-0101590
  modified_base 1: mod_base = OTHER; note = 6-aminohexanol linked by phosphate to the 5' end of 2-O-methylribose adenine
  modified_base 1..2: mod_base = OTHER; note = phosphorothioate
  modified_base 2: mod_base = OTHER; note = 2-O-methylribose adenine
  modified_base 3: mod_base = OTHER; note = 2-fluororibose uracil
  modified_base 4: mod_base = cm
  modified_base 5: mod_base = OTHER; note = 2-fluororibose adenine
  modified_base 6: mod_base = OTHER; note = 2-O-methylribose adenine
  modified_base 7: mod_base = OTHER; note = 2-fluororibose uracil
  modified_base 8: mod_base = OTHER; note = 2-fluororibose guanine
  modified_base 9: mod_base = OTHER; note = 2-fluororibose cytosine
  modified_base 10: mod_base = um
  modified_base 11: mod_base = OTHER; note = 2-fluororibose guanine
  modified_base 12: mod_base = cm
  modified_base 13: mod_base = OTHER; note = 2-fluororibose adenine
  modified_base 14: mod_base = OTHER; note = 2-O-methylribose adenine
  modified_base 15: mod_base = OTHER; note = 2-fluororibose adenine
  modified_base 16: mod_base = gm
  modified_base 17: mod_base = OTHER; note = 2-fluororibose cytosine
  modified_base 18: mod_base = um
  modified_base 18..19: mod_base = OTHER; note = phosphorothioate
  modified_base 19: mod_base = OTHER; note = 2-fluororibose adenine
  source 1..19: mol_type = other RNA
aatcaatgctgcaaagcta

SEQ ID NO: 451 - RNA, 19 nt, synthetic construct
  misc_feature 1..19: note = Synthetic: WV-41097
  misc_feature 1..19: note = Synthetic: SSR-0101591
  modified_base 1: mod_base = OTHER; note = 6-aminohexanol linked by phosphate to the 5' end of 2-O-methylribose guanine
  modified_base 1..2: mod_base = OTHER; note = phosphorothioate
  modified_base 2: mod_base = um
  modified_base 3: mod_base = OTHER; note = 2-fluororibose cytosine
  modified_base 4: mod_base = um
  modified_base 5: mod_base = OTHER; note = 2-fluororibose guanine
  modified_base 6: mod_base = OTHER; note = 2-O-methylribose adenine
  modified_base 7: mod_base = OTHER; note = 2-fluororibose cytosine
  modified_base 8: mod_base = OTHER; note = 2-fluororibose adenine
  modified_base 9: mod_base = OTHER; note = 2-fluororibose uracil
  modified_base 10: mod_base = cm
  modified_base 11: mod_base = OTHER; note = 2-fluororibose adenine
  modified_base 12: mod_base = gm
  modified_base 13: mod_base = OTHER; note = 2-fluororibose adenine
  modified_base 14: mod_base = OTHER; note = 2-O-methylribose adenine
  modified_base 15: mod_base = OTHER; note = 2-fluororibose cytosine
  modified_base 16: mod_base = um
  modified_base 17: mod_base = OTHER; note = 2-fluororibose uracil
  modified_base 18: mod_base = cm
  modified_base 18..19: mod_base = OTHER; note = phosphorothioate
  modified_base 19: mod_base = OTHER; note = 2-fluororibose adenine
  source 1..19: mol_type = other RNA
gtctgacatcagaacttca

SEQ ID NO: 452 - RNA, 19 nt, synthetic construct
  misc_feature 1..19: note = Synthetic: WV-41098
  misc_feature 1..19: note = Synthetic: SSR-0101592
  modified_base 1: mod_base = OTHER; note = 6-aminohexanol linked by phosphate to the 5' end of 2-O-methylribose cytosine
  modified_base 1..2: mod_base = OTHER; note = phosphorothioate
  modified_base 2: mod_base = OTHER; note = 2-O-methylribose adenine
  modified_base 3: mod_base = OTHER; note = 2-fluororibose cytosine
  modified_base 4: mod_base = cm
  modified_base 5: mod_base = OTHER; note = 2-fluororibose adenine
  modified_base 6: mod_base = OTHER; note = 2-O-methylribose adenine
  modified_base 7: mod_base = OTHER; note = 2-fluororibose guanine
  modified_base 8: mod_base = OTHER; note = 2-fluororibose guanine
  modified_base 9: mod_base = OTHER; note = 2-fluororibose adenine
  modified_base 10: mod_base = um
  modified_base 11: mod_base = OTHER; note = 2-fluororibose guanine
  modified_base 12: mod_base = OTHER; note = 2-O-methylribose adenine
  modified_base 13: mod_base = OTHER; note = 2-fluororibose adenine
  modified_base 14: mod_base = gm
  modified_base 15: mod_base = OTHER; note = 2-fluororibose adenine
  modified_base 16: mod_base = gm
  modified_base 17: mod_base = OTHER; note = 2-fluororibose adenine
  modified_base 18: mod_base = um
  modified_base 18..19: mod_base = OTHER; note = phosphorothioate
  modified_base 19: mod_base = OTHER; note = 2-fluororibose adenine
  source 1..19: mol_type = other RNA
caccaaggatgaagagata

SEQ ID NO: 453 - RNA, 19 nt, synthetic construct
  misc_feature 1..19: note = Synthetic: WV-41099
  misc_feature 1..19: note = Synthetic: SSR-0101593
  modified_base 1: mod_base = OTHER; note = 6-aminohexanol linked by phosphate to the 5' end of 2-O-methylribose guanine
  modified_base 1..2: mod_base = OTHER; note = phosphorothioate
  modified_base 2: mod_base = OTHER; note = 2-O-methylribose adenine
  modified_base 3: mod_base = OTHER; note = 2-fluororibose adenine
  modified_base 4: mod_base = um
  modified_base 5: mod_base = OTHER; note = 2-fluororibose adenine
  modified_base 6: mod_base = cm
  modified_base 7: mod_base = OTHER; note = 2-fluororibose uracil
  modified_base 8: mod_base = OTHER; note = 2-fluororibose guanine
  modified_base 9: mod_base = OTHER; note = 2-fluororibose guanine
  modified_base 10: mod_base = gm
  modified_base 11: mod_base = OTHER; note = 2-fluororibose uracil
  modified_base 12: mod_base = um
  modified_base 13: mod_base = OTHER; note = 2-fluororibose cytosine
  modified_base 14: mod_base = OTHER; note = 2-O-methylribose adenine
  modified_base 15: mod_base = OTHER; note = 2-fluororibose cytosine
  modified_base 16: mod_base = cm
  modified_base 17: mod_base = OTHER; note = 2-fluororibose adenine
  modified_base 18: mod_base = OTHER; note = 2-O-methylribose adenine
  modified_base 18..19: mod_base = OTHER; note = phosphorothioate
  modified_base 19: mod_base = OTHER; note = 2-fluororibose adenine
  source 1..19: mol_type = other RNA
gaatactgggttcaccaaa

SEQ ID NO: 454 - RNA, 19 nt, synthetic construct
  misc_feature 1..19: note = Synthetic: WV-41100
  misc_feature 1..19: note = Synthetic: SSR-0101594
  modified_base 1: mod_base = OTHER; note = 6-aminohexanol linked by phosphate to the 5' end of 2-O-methylribose cytosine
  modified_base 1..2: mod_base = OTHER; note = phosphorothioate
  modified_base 2: mod_base = OTHER; note = 2-O-methylribose adenine
  modified_base 3: mod_base = OTHER; note = 2-fluororibose uracil
  modified_base 4: mod_base = um
  modified_base 5: mod_base = OTHER; note = 2-fluororibose uracil
  modified_base 6: mod_base = gm
  modified_base 7: mod_base = OTHER; note = 2-fluororibose adenine
  modified_base 8: mod_base = OTHER; note = 2-fluororibose guanine
  modified_base 9: mod_base = OTHER; note = 2-fluororibose guanine
  modified_base 10: mod_base = um
  modified_base 11: mod_base = OTHER; note = 2-fluororibose cytosine
  modified_base 12: mod_base = OTHER; note = 2-O-methylribose adenine
  modified_base 13: mod_base = OTHER; note = 2-fluororibose adenine
  modified_base 14: mod_base = cm
  modified_base 15: mod_base = OTHER; note = 2-fluororibose adenine
  modified_base 16: mod_base = um
  modified_base 17: mod_base = OTHER; note = 2-fluororibose cytosine
  modified_base 18: mod_base = cm
  modified_base 18..19: mod_base = OTHER; note = phosphorothioate
  modified_base 19: mod_base = OTHER; note = 2-fluororibose adenine
  source 1..19: mol_type = other RNA
catttgaggtcaacatcca

SEQ ID NO: 455 - RNA, 21 nt, synthetic construct
  misc_feature 1..21: note = Synthetic: WV-42129
  misc_feature 1..21: note = Synthetic: SSR-0104902
  modified_base 1: mod_base = OTHER; note = 2-fluororibose uracil
  modified_base 1..2: mod_base = OTHER; note = phosphorothioate
  modified_base 2: mod_base = OTHER; note = 2-fluororibose uracil
  modified_base 2..3: mod_base = OTHER; note = phosphorothioate
  modified_base 3: mod_base = gm
  modified_base 4: mod_base = OTHER; note = 2-fluororibose cytosine
  modified_base 5: mod_base = um
  modified_base 6: mod_base = OTHER; note = 2-fluororibose guanine
  modified_base 7: mod_base = cm
  modified_base 8: mod_base = OTHER; note = 2-fluororibose adenine
  modified_base 9: mod_base = gm
  modified_base 10: mod_base = OTHER; note = 2-fluororibose uracil
  modified_base 11: mod_base = cm
  modified_base 12: mod_base = um
  modified_base 13: mod_base = OTHER; note = 2-O-methylribose adenine
  modified_base 14: mod_base = OTHER; note = 2-fluororibose cytosine
  modified_base 15: mod_base = cm
  modified_base 16: mod_base = OTHER; note = 2-fluororibose adenine
  modified_base 17: mod_base = cm
  modified_base 18: mod_base = OTHER; note = 2-fluororibose adenine
  modified_base 19: mod_base = um
  modified_base 19..20: mod_base = OTHER; note = phosphorothioate
  modified_base 20: mod_base = um
  modified_base 20..21: mod_base = OTHER; note = phosphorothioate
  modified_base 21: mod_base = um
  source 1..21: mol_type = other RNA
ttgctgcagtctaccacattt

SEQ ID NO: 456 - RNA, 21 nt, synthetic construct
  misc_feature 1..21: note = Synthetic: WV-42130
  misc_feature 1..21: note = Synthetic: SSR-0104883
  modified_base 1: mod_base = OTHER; note = 2-fluororibose uracil
  modified_base 1..2: mod_base = OTHER; note = phosphorothioate
  modified_base 2: mod_base = OTHER; note = 2-fluororibose guanine
  modified_base 2..3: mod_base = OTHER; note = phosphorothioate
  modified_base 3: mod_base = um
  modified_base 4: mod_base = OTHER; note = 2-fluororibose uracil
  modified_base 5: mod_base = gm
  modified_base 6: mod_base = OTHER; note = 2-fluororibose cytosine
  modified_base 7: mod_base = um
  modified_base 8: mod_base = OTHER; note = 2-fluororibose guanine
  modified_base 9: mod_base = cm
  modified_base 10: mod_base = OTHER; note = 2-fluororibose adenine
  modified_base 11: mod_base = gm
  modified_base 12: mod_base = um
  modified_base 13: mod_base = cm
  modified_base 14: mod_base = OTHER; note = 2-fluororibose uracil
  modified_base 15: mod_base = OTHER; note = 2-O-methylribose adenine
  modified_base 16: mod_base = OTHER; note = 2-fluororibose cytosine
  modified_base 17: mod_base = cm
  modified_base 18: mod_base = OTHER; note = 2-fluororibose adenine
  modified_base 19: mod_base = cm
  modified_base 19..20: mod_base = OTHER; note = phosphorothioate
  modified_base 20: mod_base = um
  modified_base 20..21: mod_base = OTHER; note = phosphorothioate
  modified_base 21: mod_base = um
  source 1..21: mol_type = other RNA
tgttgctgcagtctaccactt

SEQ ID NO: 457 - RNA, 21 nt, synthetic construct
  misc_feature 1..21: note = Synthetic: WV-42131
  misc_feature 1..21: note = Synthetic: SSR-0104904
  modified_base 1: mod_base = OTHER; note = 2-fluororibose uracil
  modified_base 1..2: mod_base = OTHER; note = phosphorothioate
  modified_base 2: mod_base = OTHER; note = 2-fluororibose uracil
  modified_base 2..3: mod_base = OTHER; note = phosphorothioate
  modified_base 3: mod_base = gm
  modified_base 4: mod_base = OTHER; note = 2-fluororibose uracil
  modified_base 5: mod_base = um
  modified_base 6: mod_base = OTHER; note = 2-fluororibose guanine
  modified_base 7: mod_base = cm
  modified_base 8: mod_base = OTHER; note = 2-fluororibose uracil
  modified_base 9: mod_base = gm
  modified_base 10: mod_base = OTHER; note = 2-fluororibose cytosine
  modified_base 11: mod_base = OTHER; note = 2-O-methylribose adenine
  modified_base 12: mod_base = gm
  modified_base 13: mod_base = um
  modified_base 14: mod_base = OTHER; note = 2-fluororibose cytosine
  modified_base 15: mod_base = um
  modified_base 16: mod_base = OTHER; note = 2-fluororibose adenine
  modified_base 17: mod_base = cm
  modified_base 18: mod_base = OTHER; note = 2-fluororibose cytosine
  modified_base 19: mod_base = OTHER; note = 2-O-methylribose adenine
  modified_base 19..20: mod_base = OTHER; note = phosphorothioate
  modified_base 20: mod_base = um
  modified_base 20..21: mod_base = OTHER; note = phosphorothioate
  modified_base 21: mod_base = um
  source 1..21: mol_type = other RNA
ttgttgctgcagtctaccatt

SEQ ID NO: 458 - RNA, 21 nt, synthetic construct
  misc_feature 1..21: note = Synthetic: WV-42132
  misc_feature 1..21: note = Synthetic: SSR-0104870
  modified_base 1: mod_base = OTHER; note = 2-fluororibose uracil
  modified_base 1..2: mod_base = OTHER; note = phosphorothioate
  modified_base 2: mod_base = OTHER; note = 2-fluororibose cytosine
  modified_base 2..3: mod_base = OTHER; note = phosphorothioate
  modified_base 3: mod_base = um
  modified_base 4: mod_base = OTHER; note = 2-fluororibose guanine
  modified_base 5: mod_base = um
  modified_base 6: mod_base = OTHER; note = 2-fluororibose uracil
  modified_base 7: mod_base = gm
  modified_base 8: mod_base = OTHER; note = 2-fluororibose cytosine
  modified_base 9: mod_base = um
  modified_base 10: mod_base = OTHER; note = 2-fluororibose guanine
  modified_base 11: mod_base = cm
  modified_base 12: mod_base = OTHER; note = 2-O-methylribose adenine
  modified_base 13: mod_base = gm
  modified_base 14: mod_base = OTHER; note = 2-fluororibose uracil
  modified_base 15: mod_base = cm
  modified_base 16: mod_base = OTHER; note = 2-fluororibose uracil
  modified_base 17: mod_base = OTHER; note = 2-O-methylribose adenine
  modified_base 18: mod_base = OTHER; note = 2-fluororibose cytosine
  modified_base 19: mod_base = cm
  modified_base 19..20: mod_base = OTHER; note = phosphorothioate
  modified_base 20: mod_base = um
  modified_base 20..21: mod_base = OTHER; note = phosphorothioate
  modified_base 21: mod_base = um
  source 1..21: mol_type = other RNA
tctgttgctgcagtctacctt

SEQ ID NO: 459 - RNA, 21 nt, synthetic construct
  misc_feature 1..21: note = Synthetic: WV-42133
  misc_feature 1..21: note = Synthetic: SSR-0104897
  modified_base 1: mod_base = OTHER; note = 2-fluororibose uracil
  modified_base 1..2: mod_base = OTHER; note = phosphorothioate
  modified_base 2: mod_base = OTHER; note = 2-fluororibose uracil
  modified_base 2..3: mod_base = OTHER; note = phosphorothioate
  modified_base 3: mod_base = cm
  modified_base 4: mod_base = OTHER; note = 2-fluororibose uracil
  modified_base 5: mod_base = gm
  modified_base 6: mod_base = OTHER; note = 2-fluororibose uracil
  modified_base 7: mod_base = um
  modified_base 8: mod_base = OTHER; note = 2-fluororibose guanine
  modified_base 9: mod_base = cm
  modified_base 10: mod_base = OTHER; note = 2-fluororibose uracil
  modified_base 11: mod_base = gm
  modified_base 12: mod_base = cm
  modified_base 13: mod_base = OTHER; note = 2-O-methylribose adenine
  modified_base 14: mod_base = OTHER; note = 2-fluororibose guanine
  modified_base 15: mod_base = um
  modified_base 16: mod_base = OTHER; note = 2-fluororibose cytosine
  modified_base 17: mod_base = um
  modified_base 18: mod_base = OTHER; note = 2-fluororibose adenine
  modified_base 19: mod_base = cm
  modified_base 19..20: mod_base = OTHER; note = phosphorothioate
  modified_base 20: mod_base = um
  modified_base 20..21: mod_base = OTHER; note = phosphorothioate
  modified_base 21: mod_base = um
  source 1..21: mol_type = other RNA
ttctgttgctgcagtctactt

SEQ ID NO: 460 - RNA, 21 nt, synthetic construct
  misc_feature 1..21: note = Synthetic: WV-42134
  misc_feature 1..21: note = Synthetic: SSR-0104869
  modified_base 1: mod_base = OTHER; note = 2-fluororibose uracil
  modified_base 1..2: mod_base = OTHER; note = phosphorothioate
  modified_base 2: mod_base = OTHER; note = 2-fluororibose cytosine
  modified_base 2..3: mod_base = OTHER; note = phosphorothioate
  modified_base 3: mod_base = um
  modified_base 4: mod_base = OTHER; note = 2-fluororibose cytosine
  modified_base 5: mod_base = um
  modified_base 6: mod_base = OTHER; note = 2-fluororibose guanine
  modified_base 7: mod_base = um
  modified_base 8: mod_base = OTHER; note = 2-fluororibose uracil
  modified_base 9: mod_base = gm
  modified_base 10: mod_base = OTHER; note = 2-fluororibose cytosine
  modified_base 11: mod_base = um
  modified_base 12: mod_base = gm
  modified_base 13: mod_base = cm
  modified_base 14: mod_base = OTHER; note = 2-fluororibose adenine
  modified_base 15: mod_base = gm
  modified_base 16: mod_base = OTHER; note = 2-fluororibose uracil
  modified_base 17: mod_base = cm
  modified_base 18: mod_base = OTHER; note = 2-fluororibose uracil
  modified_base 19: mod_base = OTHER; note = 2-O-methylribose adenine
  modified_base 19..20: mod_base = OTHER; note = phosphorothioate
  modified_base 20: mod_base = um
  modified_base 20..21: mod_base = OTHER; note = phosphorothioate
  modified_base 21: mod_base = um
  source 1..21: mol_type = other RNA
tctctgttgctgcagtctatt

SEQ ID NO: 461 - RNA, 21 nt, synthetic construct
  misc_feature 1..21: note = Synthetic: WV-42135
  misc_feature 1..21: note = Synthetic: SSR-0104895
  modified_base 1: mod_base = OTHER; note = 2-fluororibose uracil
  modified_base 1..2: mod_base = OTHER; note = phosphorothioate
  modified_base 2: mod_base = OTHER; note = 2-fluororibose uracil
  modified_base 2..3: mod_base = OTHER; note = phosphorothioate
  modified_base 3: mod_base = cm
  modified_base 4: mod_base = OTHER; note = 2-fluororibose uracil
  modified_base 5: mod_base = cm
  modified_base 6: mod_base = OTHER; note = 2-fluororibose uracil
  modified_base 7: mod_base = gm
  modified_base 8: mod_base = OTHER; note = 2-fluororibose uracil
  modified_base 9: mod_base = um
  modified_base 10: mod_base = OTHER; note = 2-fluororibose guanine
  modified_base 11: mod_base = cm
  modified_base 12: mod_base = um
  modified_base 13: mod_base = gm
  modified_base 14: mod_base = OTHER; note = 2-fluororibose cytosine
  modified_base 15: mod_base = OTHER; note = 2-O-methylribose adenine
  modified_base 16: mod_base = OTHER; note = 2-fluororibose guanine
  modified_base 17: mod_base = um
  modified_base 18: mod_base = OTHER; note = 2-fluororibose cytosine
  modified_base 19: mod_base = um
  modified_base 19..20: mod_base = OTHER; note = phosphorothioate
  modified_base 20: mod_base = um
  modified_base 20..21: mod_base = OTHER; note = phosphorothioate
  modified_base 21: mod_base = um
  source 1..21: mol_type = other RNA
ttctctgttgctgcagtcttt

SEQ ID NO: 462 - RNA, 21 nt, synthetic construct
  misc_feature 1..21: note = Synthetic: WV-42136
  misc_feature 1..21: note = Synthetic: SSR-0104908
  modified_base 1: mod_base = OTHER; note = 2-fluororibose uracil
  modified_base 1..2: mod_base = OTHER; note = phosphorothioate
  modified_base 2: mod_base = OTHER; note = 2-fluororibose uracil
  modified_base 2..3: mod_base = OTHER; note = phosphorothioate
  modified_base 3: mod_base = um
  modified_base 4: mod_base = OTHER; note = 2-fluororibose cytosine
  modified_base 5: mod_base = um
  modified_base 6: mod_base = OTHER; note = 2-fluororibose cytosine
  modified_base 7: mod_base = um
  modified_base 8: mod_base = OTHER; note = 2-fluororibose guanine
  modified_base 9: mod_base = um
  modified_base 10: mod_base = OTHER; note = 2-fluororibose uracil
  modified_base 11: mod_base = gm
  modified_base 12: mod_base = cm
  modified_base 13: mod_base = um
  modified_base 14: mod_base = OTHER; note = 2-fluororibose guanine
  modified_base 15: mod_base = cm
  modified_base 16: mod_base = OTHER; note = 2-fluororibose adenine
  modified_base 17: mod_base = gm
  modified_base 18: mod_base = OTHER; note = 2-fluororibose uracil
  modified_base 19: mod_base = cm
  modified_base 19..20: mod_base = OTHER; note = phosphorothioate
  modified_base 20: mod_base = um
  modified_base 20..21: mod_base = OTHER; note = phosphorothioate
  modified_base 21: mod_base = um
  source 1..21: mol_type = other RNA
tttctctgttgctgcagtctt

SEQ ID NO: 463 - RNA, 21 nt, synthetic construct
  misc_feature 1..21: note = Synthetic: WV-42137
  misc_feature 1..21: note = Synthetic: SSR-0104859
  modified_base 1: mod_base = OTHER; note = 2-fluororibose uracil
  modified_base 1..2: mod_base = OTHER; note = phosphorothioate
  modified_base 2: mod_base = OTHER; note = 2-fluororibose cytosine
  modified_base 2..3: mod_base = OTHER; note = phosphorothioate
  modified_base 3: mod_base = OTHER; note = 2-O-methylribose adenine
  modified_base 4: mod_base = OTHER; note = 2-fluororibose adenine
  modified_base 5: mod_base = OTHER; note = 2-O-methylribose adenine
  modified_base 6: mod_base = OTHER; note = 2-fluororibose adenine
  modified_base 7: mod_base = OTHER; note = 2-O-methylribose adenine
  modified_base 8: mod_base = OTHER; note = 2-fluororibose uracil
  modified_base 9: mod_base = gm
  modified_base 10: mod_base = OTHER; note = 2-fluororibose uracil
  modified_base 11: mod_base = cm
  modified_base 12: mod_base = cm
  modified_base 13: mod_base = um
  modified_base 14: mod_base = OTHER; note = 2-fluororibose adenine
  modified_base 15: mod_base = gm
  modified_base 16: mod_base = OTHER; note = 2-fluororibose guanine
  modified_base 17: mod_base = OTHER; note = 2-O-methylribose adenine
  modified_base 18: mod_base = OTHER; note = 2-fluororibose uracil
  modified_base 19: mod_base = gm
  modified_base 19..20: mod_base = OTHER; note = phosphorothioate
  modified_base 20: mod_base = um
  modified_base 20..21: mod_base = OTHER; note = phosphorothioate
  modified_base 21: mod_base = um
  source 1..21: mol_type = other RNA
tcaaaaatgtcctaggatgtt

SEQ ID NO: 464 - RNA, 21 nt, synthetic construct
  misc_feature 1..21: note = Synthetic: WV-42138
  misc_feature 1..21: note = Synthetic: SSR-0104866
  modified_base 1: mod_base = OTHER; note = 2-fluororibose uracil
  modified_base 1..2: mod_base = OTHER; note = phosphorothioate
  modified_base 2: mod_base = OTHER; note = 2-fluororibose cytosine
  modified_base 2..3: mod_base = OTHER; note = phosphorothioate
  modified_base 3: mod_base = cm
  modified_base 4: mod_base = OTHER; note = 2-fluororibose adenine
  modified_base 5: mod_base = OTHER; note = 2-O-methylribose adenine
  modified_base 6: mod_base = OTHER; note = 2-fluororibose adenine
  modified_base 7: mod_base = OTHER; note = 2-O-methylribose adenine
  modified_base 8: mod_base = OTHER; note = 2-fluororibose adenine
  modified_base 9: mod_base = um
  modified_base 10: mod_base = OTHER; note = 2-fluororibose guanine
  modified_base 11: mod_base = um
  modified_base 12: mod_base = cm
  modified_base 13: mod_base = cm
  modified_base 14: mod_base = OTHER; note = 2-fluororibose uracil
  modified_base 15: mod_base = OTHER; note = 2-O-methylribose adenine
  modified_base 16: mod_base = OTHER; note = 2-fluororibose guanine
  modified_base 17: mod_base = gm
  modified_base 18: mod_base = OTHER; note = 2-fluororibose adenine
  modified_base 19: mod_base = um
  modified_base 19..20: mod_base = OTHER; note = phosphorothioate
  modified_base 20: mod_base = um
  modified_base 20..21: mod_base = OTHER; note = phosphorothioate
  modified_base 21: mod_base = um
  source 1..21: mol_type = other RNA
tccaaaaatgtcctaggattt

SEQ ID NO: 465 - RNA, 21 nt, synthetic construct
  misc_feature 1..21: note = Synthetic: WV-42139
  misc_feature 1..21: note = Synthetic: SSR-0104892
  modified_base 1: mod_base = OTHER; note = 2-fluororibose uracil
  modified_base 1..2: mod_base = OTHER; note = phosphorothioate
  modified_base 2: mod_base = OTHER; note = 2-fluororibose uracil
  modified_base 2..3: mod_base = OTHER; note = phosphorothioate
  modified_base 3: mod_base = cm
  modified_base 4: mod_base = OTHER; note = 2-fluororibose cytosine
  modified_base 5: mod_base = OTHER; note = 2-O-methylribose adenine
  modified_base 6: mod_base = OTHER; note = 2-fluororibose adenine
  modified_base 7: mod_base = OTHER; note = 2-O-methylribose adenine
  modified_base 8: mod_base = OTHER; note = 2-fluororibose adenine
  modified_base 9: mod_base = OTHER; note = 2-O-methylribose adenine
  modified_base 10: mod_base = OTHER; note = 2-fluororibose uracil
  modified_base 11: mod_base = gm
  modified_base 12: mod_base = um
  modified_base 13: mod_base = cm
  modified_base 14: mod_base = OTHER; note = 2-fluororibose cytosine
  modified_base 15: mod_base = um
  modified_base 16: mod_base = OTHER; note = 2-fluororibose adenine
  modified_base 17: mod_base = gm
  modified_base 18: mod_base = OTHER; note = 2-fluororibose guanine
  modified_base 19: mod_base = OTHER; note = 2-O-methylribose adenine
  modified_base 19..20: mod_base = OTHER; note = phosphorothioate
  modified_base 20: mod_base = um
  modified_base 20..21: mod_base = OTHER; note = phosphorothioate
  modified_base 21: mod_base = um
  source 1..21: mol_type = other RNA
ttccaaaaatgtcctaggatt

SEQ ID NO: 466 - RNA, 21 nt, synthetic construct
  misc_feature 1..21: note = Synthetic: WV-42140
  misc_feature 1..21: note = Synthetic: SSR-0104896
  modified_base 1: mod_base = OTHER; note = 2-fluororibose uracil
  modified_base 1..2: mod_base = OTHER; note = phosphorothioate
  modified_base 2: mod_base = OTHER; note = 2-fluororibose uracil
  modified_base 2..3: mod_base = OTHER; note = phosphorothioate
  modified_base 3: mod_base = cm
  modified_base 4: mod_base = OTHER; note = 2-fluororibose uracil
  modified_base 5: mod_base = gm
  modified_base 6: mod_base = OTHER; note = 2-fluororibose cytosine
  modified_base 7: mod_base = OTHER; note = 2-O-methylribose adenine
  modified_base 8: mod_base = OTHER; note = 2-fluororibose uracil
  modified_base 9: mod_base = OTHER; note = 2-O-methylribose adenine
  modified_base 10: mod_base = OTHER; note = 2-fluororibose cytosine
  modified_base 11: mod_base = gm
  modified_base 12: mod_base = OTHER; note = 2-O-methylribose adenine
  modified_base 13: mod_base = um
  modified_base 14: mod_base = OTHER; note = 2-fluororibose uracil
  modified_base 15: mod_base = um
  modified_base 16: mod_base = OTHER; note = 2-fluororibose adenine
  modified_base 17: mod_base = OTHER; note = 2-O-methylribose adenine
  modified_base 18: mod_base = OTHER; note = 2-fluororibose adenine
  modified_base 19: mod_base = OTHER; note = 2-O-methylribose adenine
  modified_base 19..20: mod_base = OTHER; note = phosphorothioate
  modified_base 20: mod_base = um
  modified_base 20..21: mod_base = OTHER; note = phosphorothioate
  modified_base 21: mod_base = um
  source 1..21: mol_type = other RNA
ttctgcatacgatttaaaatt

SEQ ID NO: 467 - RNA, 21 nt, synthetic construct
  misc_feature 1..21: note = Synthetic: WV-42141
  misc_feature 1..21: note = Synthetic: SSR-0104858
  modified_base 1: mod_base = OTHER; note = 2-fluororibose uracil
  modified_base 1..2: mod_base = OTHER; note = phosphorothioate
  modified_base 2: mod_base = OTHER; note = 2-fluororibose adenine
  modified_base 2..3: mod_base = OTHER; note = phosphorothioate
  modified_base 3: mod_base = um
  modified_base 4: mod_base = OTHER; note = 2-fluororibose uracil
  modified_base 5: mod_base = cm
  modified_base 6: mod_base = OTHER; note = 2-fluororibose uracil
  modified_base 7: mod_base = gm
  modified_base 8: mod_base = OTHER; note = 2-fluororibose cytosine
  modified_base 9: mod_base = OTHER; note = 2-O-methylribose adenine
  modified_base 10: mod_base = OTHER; note = 2-fluororibose uracil
  modified_base 11: mod_base = OTHER; note = 2-O-methylribose adenine
  modified_base 12: mod_base = cm
  modified_base 13: mod_base = gm
  modified_base 14: mod_base = OTHER; note = 2-fluororibose adenine
  modified_base 15: mod_base = um
  modified_base 16: mod_base = OTHER; note = 2-fluororibose uracil
  modified_base 17: mod_base = um
  modified_base 18: mod_base = OTHER; note = 2-fluororibose adenine
  modified_base 19: mod_base = OTHER; note = 2-O-methylribose adenine
  modified_base 19..20: mod_base = OTHER; note = phosphorothioate
  modified_base 20: mod_base = um
  modified_base 20..21: mod_base = OTHER; note = phosphorothioate
  modified_base 21: mod_base = um
  source 1..21: mol_type = other RNA
tattctgcatacgatttaatt

SEQ ID NO: 468 - RNA, 21 nt, synthetic construct
  misc_feature 1..21: note = Synthetic: WV-42142
  misc_feature 1..21: note = Synthetic: SSR-0104855
  modified_base 1: mod_base = OTHER; note = 2-fluororibose uracil
  modified_base 1..2: mod_base = OTHER; note = phosphorothioate
  modified_base 2: mod_base = OTHER; note = 2-fluororibose adenine
  modified_base 2..3: mod_base = OTHER; note = phosphorothioate
  modified_base 3: mod_base = um
  modified_base 4: mod_base = OTHER; note = 2-fluororibose adenine
  modified_base 5: mod_base = um
  modified_base 6: mod_base = OTHER; note = 2-fluororibose uracil
  modified_base 7: mod_base = cm
  modified_base 8: mod_base = OTHER; note = 2-fluororibose uracil
  modified_base 9: mod_base = gm
  modified_base 10: mod_base = OTHER; note = 2-fluororibose cytosine
  modified_base 11: mod_base = OTHER; note = 2-O-methylribose adenine
  modified_base 12: mod_base = um
  modified_base 13: mod_base = OTHER; note = 2-O-methylribose adenine
  modified_base 14: mod_base = OTHER; note = 2-fluororibose cytosine
  modified_base 15: mod_base = gm
  modified_base 16: mod_base = OTHER; note = 2-fluororibose adenine
  modified_base 17: mod_base = um
  modified_base 18: mod_base = OTHER; note = 2-fluororibose uracil
  modified_base 19: mod_base = um
  modified_base 19..20: mod_base = OTHER; note = phosphorothioate
  modified_base 20: mod_base = um
  modified_base 20..21: mod_base = OTHER; note = phosphorothioate
  modified_base 21: mod_base = um
  source 1..21: mol_type = other RNA
tatattctgcatacgattttt

SEQ ID NO: 469 - RNA, 21 nt, synthetic construct
  misc_feature 1..21: note = Synthetic: WV-42143
  misc_feature 1..21: note = Synthetic: SSR-0104835
  modified_base 1: mod_base = OTHER; note = 2-fluororibose uracil
  modified_base 1..2: mod_base = OTHER; note = phosphorothioate
  modified_base 2: mod_base = OTHER; note = 2-fluororibose adenine
  modified_base 2..3: mod_base = OTHER; note = phosphorothioate
  modified_base 3: mod_base = OTHER; note = 2-O-methylribose adenine
  modified_base 4: mod_base = OTHER; note = 2-fluororibose uracil
  modified_base 5: mod_base = OTHER; note = 2-O-methylribose adenine
  modified_base 6: mod_base = OTHER; note = 2-fluororibose uracil
  modified_base 7: mod_base = um
  modified_base 8: mod_base = OTHER; note = 2-fluororibose cytosine
  modified_base 9: mod_base = um
  modified_base 10: mod_base = OTHER; note = 2-fluororibose guanine
  modified_base 11: mod_base = cm
  modified_base 12: mod_base = OTHER; note = 2-O-methylribose adenine
  modified_base 13: mod_base = um
  modified_base 14: mod_base = OTHER; note = 2-fluororibose adenine
  modified_base 15: mod_base = cm
  modified_base 16: mod_base = OTHER; note = 2-fluororibose guanine
  modified_base 17: mod_base = OTHER; note = 2-O-methylribose adenine
  modified_base 18: mod_base = OTHER; note = 2-fluororibose uracil
  modified_base 19: mod_base = um
  modified_base 19..20: mod_base = OTHER; note = phosphorothioate
  modified_base 20: mod_base = um
  modified_base 20..21: mod_base = OTHER; note = phosphorothioate
  modified_base 21: mod_base = um
  source 1..21: mol_type = other RNA
taatattctgcatacgatttt

SEQ ID NO: 470 - RNA, 21 nt, synthetic construct
  misc_feature 1..21: note = Synthetic: WV-42144
  misc_feature 1..21: note = Synthetic: SSR-0104872
  modified_base 1: mod_base = OTHER; note = 2-fluororibose uracil
  modified_base 1..2: mod_base = OTHER; note = phosphorothioate
  modified_base 2: mod_base = OTHER; note = 2-fluororibose guanine
  modified_base 2..3: mod_base = OTHER; note = phosphorothioate
  modified_base 3: mod_base = OTHER; note = 2-O-methylribose adenine
  modified_base 4: mod_base = OTHER; note = 2-fluororibose adenine
  modified_base 5: mod_base = um
  modified_base 6: mod_base = OTHER; note = 2-fluororibose adenine
  modified_base 7: mod_base = um
  modified_base 8: mod_base = OTHER; note = 2-fluororibose uracil
  modified_base 9: mod_base = cm
  modified_base 10: mod_base = OTHER; note = 2-fluororibose uracil
  modified_base 11: mod_base = gm
  modified_base 12: mod_base = cm
  modified_base 13: mod_base = OTHER; note = 2-O-methylribose adenine
  modified_base 14: mod_base = OTHER; note = 2-fluororibose uracil
  modified_base 15: mod_base = OTHER; note = 2-O-methylribose adenine
  modified_base 16: mod_base = OTHER; note = 2-fluororibose cytosine
  modified_base 17: mod_base = gm
  modified_base 18: mod_base = OTHER; note = 2-fluororibose adenine
  modified_base 19: mod_base = um
  modified_base 19..20: mod_base = OTHER; note = phosphorothioate
  modified_base 20: mod_base = um
  modified_base 20..21: mod_base = OTHER; note = phosphorothioate
  modified_base 21: mod_base = um
  source 1..21: mol_type = other RNA
tgaatattctgcatacgattt

SEQ ID NO: 471 - RNA, 21 nt, synthetic construct
  misc_feature 1..21: note = Synthetic: WV-42145
  misc_feature 1..21: note = Synthetic: SSR-0104899
  modified_base 1: mod_base = OTHER; note = 2-fluororibose uracil
  modified_base 1..2: mod_base = OTHER; note = phosphorothioate
  modified_base 2: mod_base = OTHER; note = 2-fluororibose uracil
  modified_base 2..3: mod_base = OTHER; note = phosphorothioate
  modified_base 3: mod_base = gm
  modified_base 4: mod_base = OTHER; note = 2-fluororibose adenine
  modified_base 5: mod_base = OTHER; note = 2-O-methylribose adenine
  modified_base 6: mod_base = OTHER; note = 2-fluororibose uracil
  modified_base 7: mod_base = OTHER; note = 2-O-methylribose adenine
  modified_base 8: mod_base = OTHER; note = 2-fluororibose uracil
  modified_base 9: mod_base = um
  modified_base 10: mod_base = OTHER; note = 2-fluororibose cytosine
  modified_base 11: mod_base = um
  modified_base 12: mod_base = gm
  modified_base 13: mod_base = cm
  modified_base 14: mod_base = OTHER; note = 2-fluororibose adenine
  modified_base 15: mod_base = um
  modified_base 16: mod_base = OTHER; note = 2-fluororibose adenine
  modified_base 17: mod_base = cm
  modified_base 18: mod_base = OTHER; note = 2-fluororibose guanine
  modified_base 19: mod_base = OTHER; note = 2-O-methylribose adenine
  modified_base 19..20: mod_base = OTHER; note = phosphorothioate
  modified_base 20: mod_base = um
  modified_base 20..21: mod_base = OTHER; note = phosphorothioate
  modified_base 21: mod_base = um
  source 1..21: mol_type = other RNA
ttgaatattctgcatacgatt

SEQ ID NO: 472 - RNA, 21 nt, synthetic construct
  misc_feature 1..21: note = Synthetic: WV-42146
  misc_feature 1..21: note = Synthetic: SSR-0104909
  modified_base 1: mod_base = OTHER; note = 2-fluororibose uracil
  modified_base 1..2: mod_base = OTHER; note = phosphorothioate
  modified_base 2: mod_base = OTHER; note = 2-fluororibose uracil
  modified_base 2..3: mod_base = OTHER; note = phosphorothioate
  modified_base 3: mod_base = um
  modified_base 4: mod_base = OTHER; note = 2-fluororibose guanine
  modified_base 5: mod_base = OTHER; note = 2-O-methylribose adenine
  modified_base 6: mod_base = OTHER; note = 2-fluororibose adenine
  modified_base 7: mod_base = um
  modified_base 8: mod_base = OTHER; note = 2-fluororibose adenine
  modified_base 9: mod_base = um
  modified_base 10: mod_base = OTHER; note = 2-fluororibose uracil
  modified_base 11: mod_base = cm
  modified_base 12: mod_base = um
  modified_base 13: mod_base = gm
  modified_base 14: mod_base = OTHER; note = 2-fluororibose cytosine
  modified_base 15: mod_base = OTHER; note = 2-O-methylribose adenine
  modified_base 16: mod_base = OTHER; note = 2-fluororibose uracil
  modified_base 17: mod_base = OTHER; note = 2-O-methylribose adenine
  modified_base 18: mod_base = OTHER; note = 2-fluororibose cytosine
  modified_base 19: mod_base = gm
  modified_base 19..20: mod_base = OTHER; note = phosphorothioate
  modified_base 20: mod_base = um
  modified_base 20..21: mod_base = OTHER; note = phosphorothioate
  modified_base 21: mod_base = um
  source 1..21: mol_type = other RNA
tttgaatattctgcatacgtt

SEQ ID NO: 473 - RNA, 21 nt, synthetic construct
  misc_feature 1..21: note = Synthetic: WV-42147
  misc_feature 1..21: note = Synthetic: SSR-0104837
  modified_base 1: mod_base = OTHER; note = 2-fluororibose uracil
  modified_base 1..2: mod_base = OTHER; note = phosphorothioate
  modified_base 2: mod_base = OTHER; note = 2-fluororibose adenine
  modified_base 2..3: mod_base = OTHER; note = phosphorothioate
  modified_base 3: mod_base = OTHER; note = 2-O-methylribose adenine
  modified_base 4: mod_base = OTHER; note = 2-fluororibose uracil
  modified_base 5: mod_base = um
  modified_base 6: mod_base = OTHER; note = 2-fluororibose guanine
  modified_base 7: mod_base = OTHER; note = 2-O-methylribose adenine
  modified_base 8: mod_base = OTHER; note = 2-fluororibose adenine
  modified_base 9: mod_base = um
  modified_base 10: mod_base = OTHER; note = 2-fluororibose adenine
  modified_base 11: mod_base = um
  modified_base 12: mod_base = um
  modified_base 13: mod_base = cm
  modified_base 14: mod_base = OTHER; note = 2-fluororibose uracil
  modified_base 15: mod_base = gm
  modified_base 16: mod_base = OTHER; note = 2-fluororibose cytosine
  modified_base 17: mod_base = OTHER; note = 2-O-methylribose adenine
  modified_base 18: mod_base = OTHER; note = 2-fluororibose uracil
  modified_base 19: mod_base = OTHER; note = 2-O-methylribose adenine
  modified_base 19..20: mod_base = OTHER; note = phosphorothioate
  modified_base 20: mod_base = um
  modified_base 20..21: mod_base = OTHER; note = phosphorothioate
  modified_base 21: mod_base = um
  source 1..21: mol_type = other RNA
taattgaatattctgcatatt

SEQ ID NO: 474 - RNA, 21 nt, synthetic construct
  misc_feature 1..21: note = Synthetic: WV-42148
  misc_feature 1..21: note = Synthetic: SSR-0104861
  modified_base 1: mod_base = OTHER; note = 2-fluororibose uracil
  modified_base 1..2: mod_base = OTHER; note = phosphorothioate
  modified_base 2: mod_base = OTHER; note = 2-fluororibose cytosine
  modified_base 2..3: mod_base = OTHER; note = phosphorothioate
  modified_base 3: mod_base = OTHER; note = 2-O-methylribose adenine
  modified_base 4: mod_base = OTHER; note = 2-fluororibose adenine
  modified_base 5: mod_base = OTHER; note = 2-O-methylribose adenine
  modified_base 6: mod_base = OTHER; note = 2-fluororibose uracil
  modified_base 7: mod_base = um
  modified_base 8: mod_base = OTHER; note = 2-fluororibose guanine
  modified_base 9: mod_base = OTHER; note = 2-O-methylribose adenine
  modified_base 10: mod_base = OTHER; note = 2-fluororibose adenine
  modified_base 11: mod_base = um
  modified_base 12: mod_base = OTHER; note = 2-O-methylribose adenine
  modified_base 13: mod_base = um
  modified_base 14: mod_base = OTHER; note = 2-fluororibose uracil
  modified_base 15: mod_base = cm
  modified_base 16: mod_base = OTHER; note = 2-fluororibose uracil
  modified_base 17: mod_base = gm
  modified_base 18: mod_base = OTHER; note = 2-fluororibose cytosine
  modified_base 19: mod_base = OTHER; note = 2-O-methylribose adenine
  modified_base 19..20: mod_base = OTHER; note = phosphorothioate
  modified_base 20: mod_base = um
  modified_base 20..21: mod_base = OTHER; note = phosphorothioate
  modified_base 21: mod_base = um
  source 1..21: mol_type = other RNA
tcaaattgaatattctgcatt

SEQ ID NO: 475 - RNA, 21 nt, synthetic construct
  misc_feature 1..21: note = Synthetic: WV-42149
  misc_feature 1..21: note = Synthetic: SSR-0104831
  modified_base 1: mod_base = OTHER; note = 2-fluororibose uracil
  modified_base 1..2: mod_base = OTHER; note = phosphorothioate
  modified_base 2: mod_base = OTHER; note = 2-fluororibose adenine
  modified_base 2..3: mod_base = OTHER; note = phosphorothioate
  modified_base 3: mod_base = OTHER; note = 2-O-methylribose adenine
  modified_base 4: mod_base = OTHER; note = 2-fluororibose guanine
  modified_base 5: mod_base = um
  modified_base 6: mod_base = OTHER; note = 2-fluororibose cytosine
  modified_base 7: mod_base = cm
  modified_base 8: mod_base = OTHER; note = 2-fluororibose adenine
  modified_base 9: mod_base = gm
  modified_base 10: mod_base = OTHER; note = 2-fluororibose adenine
  modified_base 11: mod_base = OTHER; note = 2-O-methylribose adenine
  modified_base 12: mod_base = um
  modified_base 13: mod_base = OTHER; note = 2-O-methylribose adenine
  modified_base 14: mod_base = OTHER; note = 2-fluororibose guanine
  modified_base 15: mod_base = OTHER; note = 2-O-methylribose adenine
  modified_base 16: mod_base = OTHER; note = 2-fluororibose guanine
  modified_base 17: mod_base = um
  modified_base 18: mod_base = OTHER; note = 2-fluororibose uracil
  modified_base 19: mod_base = gm
  modified_base 19..20: mod_base = OTHER; note = phosphorothioate
  modified_base 20: mod_base = um
  modified_base 20..21: mod_base = OTHER; note = phosphorothioate
  modified_base 21: mod_base = um
  source 1..21: mol_type = other RNA
taagtccagaatagagttgtt

SEQ ID NO: 476 - RNA, 21 nt, synthetic construct
  misc_feature 1..21: note = Synthetic: WV-42150
  misc_feature 1..21: note = Synthetic: SSR-0104824
  modified_base 1: mod_base = OTHER; note = 2-fluororibose uracil
  modified_base 1..2: mod_base = OTHER; note = phosphorothioate
  modified_base 2: mod_base = OTHER; note = 2-fluororibose adenine
  modified_base 2..3: mod_base = OTHER; note = phosphorothioate
  modified_base 3: mod_base = OTHER; note = 2-O-methylribose adenine
  modified_base 4: mod_base = OTHER; note = 2-fluororibose adenine
  modified_base 5: mod_base = gm
  modified_base 6: mod_base = OTHER; note = 2-fluororibose uracil
  modified_base 7: mod_base = cm
  modified_base 8: mod_base = OTHER; note = 2-fluororibose cytosine
  modified_base 9: mod_base = OTHER; note = 2-O-methylribose adenine
  modified_base 10: mod_base = OTHER; note = 2-fluororibose guanine
  modified_base 11: mod_base = OTHER; note = 2-O-methylribose adenine
  modified_base 12: mod_base = OTHER; note = 2-O-methylribose adenine
  modified_base 13: mod_base = um
  modified_base 14: mod_base = OTHER; note = 2-fluororibose adenine
  modified_base 15: mod_base = gm
  modified_base 16: mod_base = OTHER; note = 2-fluororibose adenine
  modified_base 17: mod_base = gm
  modified_base 18: mod_base = OTHER; note = 2-fluororibose uracil
  modified_base 19: mod_base = um
  modified_base 19..20: mod_base = OTHER; note = phosphorothioate
  modified_base 20: mod_base = um
  modified_base 20..21: mod_base = OTHER; note = phosphorothioate
  modified_base 21: mod_base = um
  source 1..21: mol_type = other RNA
taaagtccagaatagagtttt

SEQ ID NO: 477 - RNA, 21 nt, synthetic construct
  misc_feature 1..21: note = Synthetic: WV-42151
  misc_feature 1..21: note = Synthetic: SSR-0104884
  modified_base 1: mod_base = OTHER; note = 2-fluororibose uracil
  modified_base 1..2: mod_base = OTHER; note = phosphorothioate
  modified_base 2: mod_base = OTHER; note = 2-fluororibose uracil
  modified_base 2..3: mod_base = OTHER; note = phosphorothioate
  modified_base 3: mod_base = OTHER; note = 2-O-methylribose adenine
  modified_base 4: mod_base = OTHER; note = 2-fluororibose adenine
  modified_base 5: mod_base = OTHER; note = 2-O-methylribose adenine
  modified_base 6: mod_base = OTHER; note = 2-fluororibose guanine
  modified_base 7: mod_base = um
  modified_base 8: mod_base = OTHER; note = 2-fluororibose cytosine
  modified_base 9: mod_base = cm
  modified_base 10: mod_base = OTHER; note = 2-fluororibose adenine
  modified_base 11: mod_base = gm
  modified_base 12: mod_base = OTHER; note = 2-O-methylribose adenine
  modified_base 13: mod_base = OTHER; note = 2-O-methylribose adenine
  modified_base 14: mod_base = OTHER; note = 2-fluororibose uracil
  modified_base 15: mod_base = OTHER; note = 2-O-methylribose adenine
  modified_base 16: mod_base = OTHER; note = 2-fluororibose guanine
  modified_base 17: mod_base = OTHER; note = 2-O-methylribose adenine
  modified_base 18: mod_base = OTHER; note = 2-fluororibose guanine
  modified_base 19: mod_base = um
  modified_base 19..20: mod_base = OTHER; note = phosphorothioate
  modified_base 20: mod_base = um
  modified_base 20..21: mod_base = OTHER; note = phosphorothioate
  modified_base 21: mod_base = um
  source 1..21: mol_type = other RNA
ttaaagtccagaatagagttt

SEQ ID NO: 478 - RNA, 21 nt, synthetic construct
  misc_feature 1..21: note = Synthetic: WV-42152
  misc_feature 1..21: note = Synthetic: SSR-0104833
  modified_base 1: mod_base = OTHER; note = 2-fluororibose uracil
  modified_base 1..2: mod_base = OTHER; note = phosphorothioate
  modified_base 2: mod_base = OTHER; note = 2-fluororibose adenine
  modified_base 2..3: mod_base = OTHER; note = phosphorothioate
  modified_base 3: mod_base = OTHER; note = 2-O-methylribose adenine
  modified_base 4: mod_base = OTHER; note = 2-fluororibose uracil
  modified_base 5: mod_base = OTHER; note = 2-O-methylribose adenine
  modified_base 6: mod_base = OTHER; note = 2-fluororibose adenine
  modified_base 7: mod_base = OTHER; note = 2-O-methylribose adenine
  modified_base 8: mod_base = OTHER; note = 2-fluororibose guanine
  modified_base 9: mod_base = um
  modified_base 10: mod_base = OTHER; note = 2-fluororibose cytosine
  modified_base 11: mod_base = cm
  modified_base 12: mod_base = OTHER; note = 2-O-methylribose adenine
  modified_base 13: mod_base = gm
  modified_base 14: mod_base = OTHER; note = 2-fluororibose adenine
  modified_base 15: mod_base = OTHER; note = 2-O-methylribose adenine
  modified_base 16: mod_base = OTHER; note = 2-fluororibose uracil
  modified_base 17: mod_base = OTHER; note = 2-O-methylribose adenine
  modified_base 18: mod_base = OTHER; note = 2-fluororibose guanine
  modified_base 19: mod_base = OTHER; note = 2-O-methylribose adenine
  modified_base 19..20: mod_base = OTHER; note = phosphorothioate
  modified_base 20: mod_base = um
  modified_base 20..21: mod_base = OTHER; note = phosphorothioate
  modified_base 21: mod_base = um
  source 1..21: mol_type = other RNA
taataaagtccagaatagatt

SEQ ID NO: 479 - RNA, 21 nt, synthetic construct
  misc_feature 1..21: note = Synthetic: WV-42153
  misc_feature 1..21: note = Synthetic: SSR-0104864
  modified_base 1: mod_base = OTHER; note = 2-fluororibose uracil
  modified_base 1..2: mod_base = OTHER; note = phosphorothioate
  modified_base 2: mod_base = OTHER; note = 2-fluororibose cytosine
  modified_base 2..3: mod_base = OTHER; note = phosphorothioate
  modified_base 3: mod_base = OTHER; note = 2-O-methylribose adenine
  modified_base 4: mod_base = OTHER; note = 2-fluororibose adenine
  modified_base 5: mod_base = gm
  modified_base 6: mod_base = OTHER; note = 2-fluororibose uracil
  modified_base 7: mod_base = OTHER; note = 2-O-methylribose adenine
  modified_base 8: mod_base = OTHER; note = 2-fluororibose adenine
  modified_base 9: mod_base = um
  modified_base 10: mod_base = OTHER; note = 2-fluororibose adenine
  modified_base 11: mod_base = OTHER; note = 2-O-methylribose adenine
  modified_base 12: mod_base = OTHER; note = 2-O-methylribose adenine
  modified_base 13: mod_base = gm
  modified_base 14: mod_base = OTHER; note = 2-fluororibose uracil
  modified_base 15: mod_base = cm
  modified_base 16: mod_base = OTHER; note = 2-fluororibose cytosine
  modified_base 17: mod_base = OTHER; note = 2-O-methylribose adenine
  modified_base 18: mod_base = OTHER; note = 2-fluororibose guanine
  modified_base 19: mod_base = OTHER; note = 2-O-methylribose adenine
  modified_base 19..20: mod_base = OTHER; note = phosphorothioate
  modified_base 20: mod_base = um
  modified_base 20..21: mod_base = OTHER; note = phosphorothioate
  modified_base 21: mod_base = um
  source 1..21: mol_type = other RNA
tcaagtaataaagtccagatt

SEQ ID NO: 480 - RNA, 21 nt, synthetic construct
  misc_feature 1..21: note = Synthetic: WV-42154
  misc_feature 1..21: note = Synthetic: SSR-0104873
  modified_base 1: mod_base = OTHER; note = 2-fluororibose uracil
  modified_base 1..2: mod_base = OTHER; note = phosphorothioate
  modified_base 2: mod_base = OTHER; note = 2-fluororibose guanine
  modified_base 2..3: mod_base = OTHER; note = phosphorothioate
  modified_base 3: mod_base = OTHER; note = 2-O-methylribose adenine
  modified_base 4: mod_base = OTHER; note = 2-fluororibose guanine
  modified_base 5: mod_base = gm
  modified_base 6: mod_base = OTHER; note = 2-fluororibose guanine
  modified_base 7: mod_base = um
  modified_base 8: mod_base = OTHER; note = 2-fluororibose cytosine
  modified_base 9: mod_base = cm
  modified_base 10: mod_base = OTHER; note = 2-fluororibose adenine
  modified_base 11: mod_base = cm
  modified_base 12: mod_base = um
  modified_base 13: mod_base = um
  modified_base 14: mod_base = OTHER; note = 2-fluororibose uracil
  modified_base 15: mod_base = um
  modified_base 16: mod_base = OTHER; note = 2-fluororibose guanine
  modified_base 17: mod_base = gm
  modified_base 18: mod_base = OTHER; note = 2-fluororibose uracil
  modified_base 19: mod_base = gm
  modified_base 19..20: mod_base = OTHER; note = phosphorothioate
  modified_base 20: mod_base = um
  modified_base 20..21: mod_base = OTHER; note = phosphorothioate
  modified_base 21: mod_base = um
  source 1..21: mol_type = other RNA
tgagggtccacttttggtgtt

SEQ ID NO: 481 - RNA, 21 nt, synthetic construct
  misc_feature 1..21: note = Synthetic: WV-42155
  misc_feature 1..21: note = Synthetic: SSR-0104845
  modified_base 1: mod_base = OTHER; note = 2-fluororibose uracil
  modified_base 1..2: mod_base = OTHER; note = phosphorothioate
  modified_base 2: mod_base = OTHER; note = 2-fluororibose adenine
  modified_base 2..3: mod_base = OTHER; note = phosphorothioate
  modified_base 3: mod_base = gm
  modified_base 4: mod_base = OTHER; note = 2-fluororibose adenine
  modified_base 5: mod_base = gm
  modified_base 6: mod_base = OTHER; note = 2-fluororibose guanine
  modified_base 7: mod_base = gm
  modified_base 8: mod_base = OTHER; note = 2-fluororibose uracil
  modified_base 9: mod_base = cm
  modified_base 10: mod_base = OTHER; note = 2-fluororibose cytosine
  modified_base 11: mod_base = OTHER; note = 2-O-methylribose adenine
  modified_base 12: mod_base = cm
  modified_base 13: mod_base = um
  modified_base 14: mod_base = OTHER; note = 2-fluororibose uracil
  modified_base 15: mod_base = um
  modified_base 16: mod_base = OTHER; note = 2-fluororibose uracil
  modified_base 17: mod_base = gm
  modified_base 18: mod_base = OTHER; note = 2-fluororibose guanine
  modified_base 19: mod_base = um
  modified_base 19..20: mod_base = OTHER; note = phosphorothioate
  modified_base 20: mod_base = um
  modified_base 20..21: mod_base = OTHER; note = phosphorothioate
  modified_base 21: mod_base = um
  source 1..21: mol_type = other RNA
tagagggtccacttttggttt

SEQ ID NO: 482 - RNA, 21 nt, synthetic construct
  misc_feature 1..21: note = Synthetic: WV-42156
  misc_feature 1..21: note = Synthetic: SSR-0104888
  modified_base 1: mod_base = OTHER; note = 2-fluororibose uracil
  modified_base 1..2: mod_base = OTHER; note = phosphorothioate
  modified_base 2: mod_base = OTHER; note = 2-fluororibose uracil
  modified_base 2..3: mod_base = OTHER; note = phosphorothioate
  modified_base 3: mod_base = OTHER; note = 2-O-methylribose adenine
  modified_base 4: mod_base = OTHER; note = 2-fluororibose guanine
  modified_base 5: mod_base = OTHER; note = 2-O-methylribose adenine
  modified_base 6: mod_base = OTHER; note = 2-fluororibose guanine
  modified_base 7: mod_base = gm
  modified_base 8: mod_base = OTHER; note = 2-fluororibose guanine
  modified_base 9: mod_base = um
  modified_base 10: mod_base = OTHER; note = 2-fluororibose cytosine
  modified_base 11: mod_base = cm
  modified_base 12: mod_base = OTHER; note = 2-O-methylribose adenine
  modified_base 13: mod_base = cm
  modified_base 14: mod_base = OTHER; note = 2-fluororibose uracil
  modified_base 15: mod_base = um
  modified_base 16: mod_base = OTHER; note = 2-fluororibose uracil
  modified_base 17: mod_base = um
  modified_base 18: mod_base = OTHER; note = 2-fluororibose guanine
  modified_base 19: mod_base = gm
  modified_base 19..20: mod_base = OTHER; note = phosphorothioate
  modified_base 20: mod_base = um
  modified_base 20..21: mod_base = OTHER; note = phosphorothioate
  modified_base 21: mod_base = um
  source 1..21: mol_type = other RNA
ttagagggtccacttttggtt

SEQ ID NO: 483 - RNA, 21 nt, synthetic construct
  misc_feature 1..21: note = Synthetic: WV-42157
  misc_feature 1..21: note = Synthetic: SSR-0104854
  modified_base 1: mod_base = OTHER; note = 2-fluororibose uracil
  modified_base 1..2: mod_base = OTHER; note = phosphorothioate
  modified_base 2: mod_base = OTHER; note = 2-fluororibose adenine
  modified_base 2..3: mod_base = OTHER; note = phosphorothioate
  modified_base 3: mod_base = um
  modified_base 4: mod_base = OTHER; note = 2-fluororibose adenine
  modified_base 5: mod_base = gm
  modified_base 6: mod_base = OTHER; note = 2-fluororibose adenine
  modified_base 7: mod_base = gm
  modified_base 8: mod_base = OTHER; note = 2-fluororibose guanine
  modified_base 9: mod_base = gm
  modified_base 10: mod_base = OTHER; note = 2-fluororibose uracil
  modified_base 11: mod_base = cm
  modified_base 12: mod_base = cm
  modified_base 13: mod_base = OTHER; note = 2-O-methylribose adenine
  modified_base 14: mod_base = OTHER; note = 2-fluororibose cytosine
  modified_base 15: mod_base = um
  modified_base 16: mod_base = OTHER; note = 2-fluororibose uracil
  modified_base 17: mod_base = um
  modified_base 18: mod_base = OTHER; note = 2-fluororibose uracil
  modified_base 19: mod_base = gm
  modified_base 19..20: mod_base = OTHER; note = phosphorothioate
  modified_base 20: mod_base = um
  modified_base 20..21: mod_base = OTHER; note = phosphorothioate
  modified_base 21: mod_base = um
  source 1..21: mol_type = other RNA
tatagagggtccacttttgtt

SEQ ID NO: 484 - RNA, 21 nt, synthetic construct
  misc_feature 1..21: note = Synthetic: WV-42158
  misc_feature 1..21: note = Synthetic: SSR-0104891
  modified_base 1: mod_base = OTHER; note = 2-fluororibose uracil
  modified_base 1..2: mod_base = OTHER; note = phosphorothioate
  modified_base 2: mod_base = OTHER; note = 2-fluororibose uracil
  modified_base 2..3: mod_base = OTHER; note = phosphorothioate
  modified_base 3: mod_base = OTHER; note = 2-O-methylribose adenine
  modified_base 4: mod_base = OTHER; note = 2-fluororibose uracil
  modified_base 5: mod_base = OTHER; note = 2-O-methylribose adenine
  modified_base 6: mod_base = OTHER; note = 2-fluororibose guanine
  modified_base 7: mod_base = OTHER; note = 2-O-methylribose adenine
  modified_base 8: mod_base = OTHER; note = 2-fluororibose guanine
  modified_base 9: mod_base = gm
  modified_base 10: mod_base = OTHER; note = 2-fluororibose guanine
  modified_base 11: mod_base = um
  modified_base 12: mod_base = cm
  modified_base 13: mod_base = cm
  modified_base 14: mod_base = OTHER; note = 2-fluororibose adenine
  modified_base 15: mod_base = cm
  modified_base 16: mod_base = OTHER; note = 2-fluororibose uracil
  modified_base 17: mod_base = um
  modified_base 18: mod_base = OTHER; note = 2-fluororibose uracil
  modified_base 19: mod_base = um
  modified_base 19..20: mod_base = OTHER; note = phosphorothioate
  modified_base 20: mod_base = um
  modified_base 20..21: mod_base = OTHER; note = phosphorothioate
  modified_base 21: mod_base = um
  source 1..21: mol_type = other RNA
ttatagagggtccactttttt

SEQ ID NO: 485 - RNA, 21 nt, synthetic construct
  misc_feature 1..21: note = Synthetic: WV-42159
  misc_feature 1..21: note = Synthetic: SSR-0104830
  modified_base 1: mod_base = OTHER; note = 2-fluororibose uracil
  modified_base 1..2: mod_base = OTHER; note = phosphorothioate
  modified_base 2: mod_base = OTHER; note = 2-fluororibose adenine
  modified_base 2..3: mod_base = OTHER; note = phosphorothioate
  modified_base 3: mod_base = OTHER; note = 2-O-methylribose adenine
  modified_base 4: mod_base = OTHER; note = 2-fluororibose guanine
  modified_base 5: mod_base = gm
  modified_base 6: mod_base = OTHER; note = 2-fluororibose guanine
  modified_base 7: mod_base = OTHER; note = 2-O-methylribose adenine
  modified_base 8: mod_base = OTHER; note = 2-fluororibose guanine
  modified_base 9: mod_base = gm
  modified_base 10: mod_base = OTHER; note = 2-fluororibose adenine
  modified_base 11: mod_base = OTHER; note = 2-O-methylribose adenine
  modified_base 12: mod_base = OTHER; note = 2-O-methylribose adenine
  modified_base 13: mod_base = um
  modified_base 14: mod_base = OTHER; note = 2-fluororibose adenine
  modified_base 15: mod_base = um
  modified_base 16: mod_base = OTHER; note = 2-fluororibose adenine
  modified_base 17: mod_base = gm
  modified_base 18: mod_base = OTHER; note = 2-fluororibose adenine
  modified_base 19: mod_base = gm
  modified_base 19..20: mod_base = OTHER; note = phosphorothioate
  modified_base 20: mod_base = um
  modified_base 20..21: mod_base = OTHER; note = phosphorothioate
  modified_base 21: mod_base = um
  source 1..21: mol_type = other RNA
taagggaggaaatatagagtt

SEQ ID NO: 486 - RNA, 21 nt, synthetic construct
  misc_feature 1..21: note = Synthetic: WV-42160
  misc_feature 1..21: note = Synthetic: SSR-0104900
  modified_base 1: mod_base = OTHER; note = 2-fluororibose uracil
  modified_base 1..2: mod_base = OTHER; note = phosphorothioate
  modified_base 2: mod_base = OTHER; note = 2-fluororibose uracil
  modified_base 2..3: mod_base = OTHER; note = phosphorothioate
  modified_base 3: mod_base = gm
  modified_base 4: mod_base = OTHER; note = 2-fluororibose adenine
  modified_base 5: mod_base = gm
  modified_base 6: mod_base = OTHER; note = 2-fluororibose cytosine
  modified_base 7: mod_base = cm
  modified_base 8: mod_base = OTHER; note = 2-fluororibose uracil
  modified_base 9: mod_base = OTHER; note = 2-O-methylribose adenine
  modified_base 10: mod_base = OTHER; note = 2-fluororibose adenine
  modified_base 11: mod_base = OTHER; note = 2-O-methylribose adenine
  modified_base 12: mod_base = OTHER; note = 2-O-methylribose adenine
  modified_base 13: mod_base = um
  modified_base 14: mod_base = OTHER; note = 2-fluororibose uracil
  modified_base 15: mod_base = gm
  modified_base 16: mod_base = OTHER; note = 2-fluororibose uracil
  modified_base 17: mod_base = cm
  modified_base 18: mod_base = OTHER; note = 2-fluororibose uracil
  modified_base 19: mod_base = OTHER; note = 2-O-methylribose adenine
  modified_base 19..20: mod_base = OTHER; note = phosphorothioate
  modified_base 20: mod_base = um
  modified_base 20..21: mod_base = OTHER; note = phosphorothioate
  modified_base 21: mod_base = um
  source 1..21: mol_type = other RNA
ttgagcctaaaattgtctatt

SEQ ID NO: 487 - RNA, 21 nt, synthetic construct
  misc_feature 1..21: note = Synthetic: WV-42161
  misc_feature 1..21: note = Synthetic: SSR-0104911
  modified_base 1: mod_base = OTHER; note = 2-fluororibose uracil
  modified_base 1..2: mod_base = OTHER; note = phosphorothioate
  modified_base 2: mod_base = OTHER; note = 2-fluororibose uracil
  modified_base 2..3: mod_base = OTHER; note = phosphorothioate
  modified_base 3: mod_base = um
  modified_base 4: mod_base = OTHER; note = 2-fluororibose uracil
  modified_base 5: mod_base = um
  modified_base 6: mod_base = OTHER; note = 2-fluororibose guanine
  modified_base 7: mod_base = OTHER; note = 2-O-methylribose adenine
  modified_base 8: mod_base = OTHER; note = 2-fluororibose guanine
  modified_base 9: mod_base = cm
  modified_base 10: mod_base = OTHER; note = 2-fluororibose cytosine
  modified_base 11: mod_base = um
  modified_base 12: mod_base = OTHER; note = 2-O-methylribose adenine
  modified_base 13: mod_base = OTHER; note = 2-O-methylribose adenine
  modified_base 14: mod_base = OTHER; note = 2-fluororibose adenine
  modified_base 15: mod_base = OTHER; note = 2-O-methylribose adenine
  modified_base 16: mod_base = OTHER; note = 2-fluororibose uracil
  modified_base 17: mod_base = um
  modified_base 18: mod_base = OTHER; note = 2-fluororibose guanine
  modified_base 19: mod_base = um
  modified_base 19..20: mod_base = OTHER; note = phosphorothioate
  modified_base 20: mod_base = um
  modified_base 20..21: mod_base = OTHER; note = phosphorothioate
  modified_base 21: mod_base = um
  source 1..21: mol_type = other RNA
tttttgagcctaaaattgttt

SEQ ID NO: 488 - RNA, 21 nt, synthetic construct
  misc_feature 1..21: note = Synthetic: WV-42162
  misc_feature 1..21: note = Synthetic: SSR-0104840
  modified_base 1: mod_base = OTHER; note = 2-fluororibose uracil
  modified_base 1..2: mod_base = OTHER; note = phosphorothioate
  modified_base 2: mod_base = OTHER; note = 2-fluororibose adenine
  modified_base 2..3: mod_base = OTHER; note = phosphorothioate
  modified_base 3: mod_base = cm
  modified_base 4: mod_base = OTHER; note = 2-fluororibose adenine
  modified_base 5: mod_base = gm
  modified_base 6: mod_base = OTHER; note = 2-fluororibose uracil
  modified_base 7: mod_base = um
  modified_base 8: mod_base = OTHER; note = 2-fluororibose cytosine
  modified_base 9: mod_base = cm
  modified_base 10: mod_base = OTHER; note = 2-fluororibose uracil
  modified_base 11: mod_base = um
  modified_base 12: mod_base = um
  modified_base 13: mod_base = um
  modified_base 14: mod_base = OTHER; note = 2-fluororibose cytosine
  modified_base 15: mod_base = cm
  modified_base 16: mod_base = OTHER; note = 2-fluororibose uracil
  modified_base 17: mod_base = gm
  modified_base 18: mod_base = OTHER; note = 2-fluororibose uracil
  modified_base 19: mod_base = gm
  modified_base 19..20: mod_base = OTHER; note = phosphorothioate
  modified_base 20: mod_base = um
  modified_base 20..21: mod_base = OTHER; note = phosphorothioate
  modified_base 21: mod_base = um
  source 1..21: mol_type = other RNA
tacagttccttttcctgtgtt

SEQ ID NO: 489 - RNA, 21 nt, synthetic construct
  misc_feature 1..21: note = Synthetic: WV-42163
  misc_feature 1..21: note = Synthetic: SSR-0104887
  modified_base 1: mod_base = OTHER; note = 2-fluororibose uracil
  modified_base 1..2: mod_base = OTHER; note = phosphorothioate
  modified_base 2: mod_base = OTHER; note = 2-fluororibose uracil
  modified_base 2..3: mod_base = OTHER; note = phosphorothioate
  modified_base 3: mod_base = OTHER; note = 2-O-methylribose adenine
  modified_base 4: mod_base = OTHER; note = 2-fluororibose adenine
  modified_base 5: mod_base = um
  modified_base 6: mod_base = OTHER; note = 2-fluororibose adenine
  modified_base 7: mod_base = gm
  modified_base 8: mod_base = OTHER; note = 2-fluororibose cytosine
  modified_base 9: mod_base = cm
  modified_base 10: mod_base = OTHER; note = 2-fluororibose adenine
  modified_base 11: mod_base = gm
  modified_base 12: mod_base = um
  modified_base 13: mod_base = OTHER; note = 2-O-methylribose adenine
  modified_base 14: mod_base = OTHER; note = 2-fluororibose cytosine
  modified_base 15: mod_base = OTHER; note = 2-O-methylribose adenine
  modified_base 16: mod_base = OTHER; note = 2-fluororibose guanine
  modified_base 17: mod_base = um
  modified_base 18: mod_base = OTHER; note = 2-fluororibose uracil
  modified_base 19: mod_base = cm
  modified_base 19..20: mod_base = OTHER; note = phosphorothioate
  modified_base 20: mod_base = um
  modified_base 20..21: mod_base = OTHER; note = phosphorothioate
  modified_base 21: mod_base = um
  source 1..21: mol_type = other RNA
ttaatagccagtacagttctt

SEQ ID NO: 490 - RNA, 21 nt, synthetic construct
  misc_feature 1..21: note = Synthetic: WV-42164
  misc_feature 1..21: note = Synthetic: SSR-0104879
  modified_base 1: mod_base = OTHER; note = 2-fluororibose uracil
  modified_base 1..2: mod_base = OTHER; note = phosphorothioate
  modified_base 2: mod_base = OTHER; note = 2-fluororibose guanine
  modified_base 2..3: mod_base = OTHER; note = phosphorothioate
  modified_base 3: mod_base = um
  modified_base 4: mod_base = OTHER; note = 2-fluororibose adenine
  modified_base 5: mod_base = OTHER; note = 2-O-methylribose adenine
  modified_base 6: mod_base = OTHER; note = 2-fluororibose uracil
  modified_base 7: mod_base = OTHER; note = 2-O-methylribose adenine
  modified_base 8: mod_base = OTHER; note = 2-fluororibose guanine
  modified_base 9: mod_base = cm
  modified_base 10: mod_base = OTHER; note = 2-fluororibose cytosine
  modified_base 11: mod_base = OTHER; note = 2-O-methylribose adenine
  modified_base 12: mod_base = gm
  modified_base 13: mod_base = um
  modified_base 14: mod_base = OTHER; note = 2-fluororibose adenine
  modified_base 15: mod_base = cm
  modified_base 16: mod_base = OTHER; note = 2-fluororibose adenine
  modified_base 17: mod_base = gm
  modified_base 18: mod_base = OTHER; note = 2-fluororibose uracil
  modified_base 19: mod_base = um
  modified_base 19..20: mod_base = OTHER; note = phosphorothioate
  modified_base 20: mod_base = um
  modified_base 20..21: mod_base = OTHER; note = phosphorothioate
  modified_base 21: mod_base = um
  source 1..21: mol_type = other RNA
tgtaatagccagtacagtttt

SEQ ID NO: 491 - RNA, 21 nt, synthetic construct
  misc_feature 1..21: note = Synthetic: WV-42165
  misc_feature 1..21: note = Synthetic: SSR-0104850
  modified_base 1: mod_base = OTHER; note = 2-fluororibose uracil
  modified_base 1..2: mod_base = OTHER; note = phosphorothioate
  modified_base 2: mod_base = OTHER; note = 2-fluororibose adenine
  modified_base 2..3: mod_base = OTHER; note = phosphorothioate
  modified_base 3: mod_base = gm
  modified_base 4: mod_base = OTHER; note = 2-fluororibose uracil
  modified_base 5: mod_base = gm
  modified_base 6: mod_base = OTHER; note = 2-fluororibose guanine
  modified_base 7: mod_base = gm
  modified_base 8: mod_base = OTHER; note = 2-fluororibose adenine
  modified_base 9: mod_base = gm
  modified_base 10: mod_base = OTHER; note = 2-fluororibose uracil
  modified_base 11: mod_base = cm
  modified_base 12: mod_base = gm
  modified_base 13: mod_base = gm
  modified_base 14: mod_base = OTHER; note = 2-fluororibose adenine
  modified_base 15: mod_base = um
  modified_base 16: mod_base = OTHER; note = 2-fluororibose uracil
  modified_base 17: mod_base = OTHER; note = 2-O-methylribose adenine
  modified_base 18: mod_base = OTHER; note = 2-fluororibose uracil
  modified_base 19: mod_base = um
  modified_base 19..20: mod_base = OTHER; note = phosphorothioate
  modified_base 20: mod_base = um
  modified_base 20..21: mod_base = OTHER; note = phosphorothioate
  modified_base 21: mod_base = um
  source 1..21: mol_type = other RNA
tagtgggagtcggattatttt

SEQ ID NO: 492 - RNA, 21 nt, synthetic construct
  misc_feature 1..21: note = Synthetic: WV-42166
  misc_feature 1..21: note = Synthetic: SSR-0104880
  modified_base 1: mod_base = OTHER; note = 2-fluororibose uracil
  modified_base 1..2: mod_base = OTHER; note = phosphorothioate
  modified_base 2: mod_base = OTHER; note = 2-fluororibose guanine
  modified_base 2..3: mod_base = OTHER; note = phosphorothioate
  modified_base 3: mod_base = um
  modified_base 4: mod_base = OTHER; note = 2-fluororibose adenine
  modified_base 5: mod_base = gm
  modified_base 6: mod_base = OTHER; note = 2-fluororibose uracil
  modified_base 7: mod_base = gm
  modified_base 8: mod_base = OTHER; note = 2-fluororibose guanine
  modified_base 9: mod_base = gm
  modified_base 10: mod_base = OTHER; note = 2-fluororibose adenine
  modified_base 11: mod_base = gm
  modified_base 12: mod_base = um
  modified_base 13: mod_base = cm
  modified_base 14: mod_base = OTHER; note = 2-fluororibose guanine
  modified_base 15: mod_base = gm
  modified_base 16: mod_base = OTHER; note = 2-fluororibose adenine
  modified_base 17: mod_base = um
  modified_base 18: mod_base = OTHER; note = 2-fluororibose uracil
  modified_base 19: mod_base = OTHER; note = 2-O-methylribose adenine
  modified_base 19..20: mod_base = OTHER; note = phosphorothioate
  modified_base 20: mod_base = um
  modified_base 20..21: mod_base = OTHER; note = phosphorothioate
  modified_base 21: mod_base = um
  source 1..21: mol_type = other RNA
tgtagtgggagtcggattatt

SEQ ID NO: 493 - RNA, 21 nt, synthetic construct
  misc_feature 1..21: note = Synthetic: WV-42167
  misc_feature 1..21: note = Synthetic: SSR-0104903
  modified_base 1: mod_base = OTHER; note = 2-fluororibose uracil
  modified_base 1..2: mod_base = OTHER; note = phosphorothioate
  modified_base 2: mod_base = OTHER; note = 2-fluororibose uracil
  modified_base 2..3: mod_base = OTHER; note = phosphorothioate
  modified_base 3: mod_base = gm
  modified_base 4: mod_base = OTHER; note = 2-fluororibose uracil
  modified_base 5: mod_base = OTHER; note = 2-O-methylribose adenine
  modified_base 6: mod_base = OTHER; note = 2-fluororibose guanine
  modified_base 7: mod_base = um
  modified_base 8: mod_base = OTHER; note = 2-fluororibose guanine
  modified_base 9: mod_base = gm
  modified_base 10: mod_base = OTHER; note = 2-fluororibose guanine
  modified_base 11: mod_base = OTHER; note = 2-O-methylribose adenine
  modified_base 12: mod_base = gm
  modified_base 13: mod_base = um
  modified_base 14: mod_base = OTHER; note = 2-fluororibose cytosine
  modified_base 15: mod_base = gm
  modified_base 16: mod_base = OTHER; note = 2-fluororibose guanine
  modified_base 17: mod_base = OTHER; note = 2-O-methylribose adenine
  modified_base 18: mod_base = OTHER; note = 2-fluororibose uracil
  modified_base 19: mod_base = um
  modified_base 19..20: mod_base = OTHER; note = phosphorothioate
  modified_base 20: mod_base = um
  modified_base 20..21: mod_base = OTHER; note = phosphorothioate
  modified_base 21: mod_base = um
  source 1..21: mol_type = other RNA
ttgtagtgggagtcggatttt

SEQ ID NO: 494 - RNA, 21 nt, synthetic construct
  misc_feature 1..21: note = Synthetic: WV-42168
  misc_feature 1..21: note = Synthetic: SSR-0104875
  modified_base 1: mod_base = OTHER; note = 2-fluororibose uracil
  modified_base 1..2: mod_base = OTHER; note = phosphorothioate
  modified_base 2: mod_base = OTHER; note = 2-fluororibose guanine
  modified_base 2..3: mod_base = OTHER; note = phosphorothioate
  modified_base 3: mod_base = OTHER; note = 2-O-methylribose adenine
  modified_base 4: mod_base = OTHER; note = 2-fluororibose uracil
  modified_base 5: mod_base = gm
  modified_base 6: mod_base = OTHER; note = 2-fluororibose uracil
  modified_base 7: mod_base = OTHER; note = 2-O-methylribose adenine
  modified_base 8: mod_base = OTHER; note = 2-fluororibose guanine
  modified_base 9: mod_base = um
  modified_base 10: mod_base = OTHER; note = 2-fluororibose guanine
  modified_base 11: mod_base = gm
  modified_base 12: mod_base = gm
  modified_base 13: mod_base = OTHER; note = 2-O-methylribose adenine
  modified_base 14: mod_base = OTHER; note = 2-fluororibose guanine
  modified_base 15: mod_base = um
  modified_base 16: mod_base = OTHER; note = 2-fluororibose cytosine
  modified_base 17: mod_base = gm
  modified_base 18: mod_base = OTHER; note = 2-fluororibose guanine
  modified_base 19: mod_base = OTHER; note = 2-O-methylribose adenine
  modified_base 19..20: mod_base = OTHER; note = phosphorothioate
  modified_base 20: mod_base = um
  modified_base 20..21: mod_base = OTHER; note = phosphorothioate
  modified_base 21: mod_base = um
  source 1..21: mol_type = other RNA
tgatgtagtgggagtcggatt

SEQ ID NO: 495 - RNA, 21 nt, synthetic construct
  misc_feature 1..21: note = Synthetic: WV-42169
  misc_feature 1..21: note = Synthetic: SSR-0104901
  modified_base 1: mod_base = OTHER; note = 2-fluororibose uracil
  modified_base 1..2: mod_base = OTHER; note = phosphorothioate
  modified_base 2: mod_base = OTHER; note = 2-fluororibose uracil
  modified_base 2..3: mod_base = OTHER; note = phosphorothioate
  modified_base 3: mod_base = gm
  modified_base 4: mod_base = OTHER; note = 2-fluororibose adenine
  modified_base 5: mod_base = um
  modified_base 6: mod_base = OTHER; note = 2-fluororibose guanine
  modified_base 7: mod_base = um
  modified_base 8: mod_base = OTHER; note = 2-fluororibose adenine
  modified_base 9: mod_base = gm
  modified_base 10: mod_base = OTHER; note = 2-fluororibose uracil
  modified_base 11: mod_base = gm
  modified_base 12: mod_base = gm
  modified_base 13: mod_base = gm
  modified_base 14: mod_base = OTHER; note = 2-fluororibose adenine
  modified_base 15: mod_base = gm
  modified_base 16: mod_base = OTHER; note = 2-fluororibose uracil
  modified_base 17: mod_base = cm
  modified_base 18: mod_base = OTHER; note = 2-fluororibose guanine
  modified_base 19: mod_base = gm
  modified_base 19..20: mod_base = OTHER; note = phosphorothioate
  modified_base 20: mod_base = um
  modified_base 20..21: mod_base = OTHER; note = phosphorothioate
  modified_base 21: mod_base = um
  source 1..21: mol_type = other RNA
ttgatgtagtgggagtcggtt

SEQ ID NO: 496 - RNA, 21 nt, synthetic construct
  misc_feature 1..21: note = Synthetic: WV-42170
  misc_feature 1..21: note = Synthetic: SSR-0104910
  modified_base 1: mod_base = OTHER; note = 2-fluororibose uracil
  modified_base 1..2: mod_base = OTHER; note = phosphorothioate
  modified_base 2: mod_base = OTHER; note = 2-fluororibose uracil
  modified_base 2..3: mod_base = OTHER; note = phosphorothioate
  modified_base 3: mod_base = um
  modified_base 4: mod_base = OTHER; note = 2-fluororibose guanine
  modified_base 5: mod_base = OTHER; note = 2-O-methylribose adenine
  modified_base 6: mod_base = OTHER; note = 2-fluororibose uracil
  modified_base 7: mod_base = gm
  modified_base 8: mod_base = OTHER; note = 2-fluororibose uracil
  modified_base 9: mod_base = OTHER; note = 2-O-methylribose adenine
  modified_base 10: mod_base = OTHER; note = 2-fluororibose guanine
  modified_base 11: mod_base = um
  modified_base 12: mod_base = gm
  modified_base 13: mod_base = gm
  modified_base 14: mod_base = OTHER; note = 2-fluororibose guanine
  modified_base 15: mod_base = OTHER; note = 2-O-methylribose adenine
  modified_base 16: mod_base = OTHER; note = 2-fluororibose guanine
  modified_base 17: mod_base = um
  modified_base 18: mod_base = OTHER; note = 2-fluororibose cytosine
  modified_base 19: mod_base = gm
  modified_base 19..20: mod_base = OTHER; note = phosphorothioate
  modified_base 20: mod_base = um
  modified_base 20..21: mod_base = OTHER; note = phosphorothioate
  modified_base 21: mod_base = um
  source 1..21: mol_type = other RNA
tttgatgtagtgggagtcgtt

SEQ ID NO: 497 - RNA, 21 nt, synthetic construct
  misc_feature 1..21: note = Synthetic: WV-42171
  misc_feature 1..21: note = Synthetic: SSR-0104871
  modified_base 1: mod_base = OTHER; note = 2-fluororibose uracil
  modified_base 1..2: mod_base = OTHER; note = phosphorothioate
  modified_base 2: mod_base = OTHER; note = 2-fluororibose cytosine
  modified_base 2..3: mod_base = OTHER; note = phosphorothioate
  modified_base 3: mod_base = um
  modified_base 4: mod_base = OTHER; note = 2-fluororibose uracil
  modified_base 5: mod_base = gm
  modified_base 6: mod_base = OTHER; note = 2-fluororibose adenine
  modified_base 7: mod_base = um
  modified_base 8: mod_base = OTHER; note = 2-fluororibose guanine
  modified_base 9: mod_base = um
  modified_base 10: mod_base = OTHER; note = 2-fluororibose adenine
  modified_base 11: mod_base = gm
  modified_base 12: mod_base = um
  modified_base 13: mod_base = gm
  modified_base 14: mod_base = OTHER; note = 2-fluororibose guanine
  modified_base 15: mod_base = gm
  modified_base 16: mod_base = OTHER; note = 2-fluororibose adenine
  modified_base 17: mod_base = gm
  modified_base 18: mod_base = OTHER; note = 2-fluororibose uracil
  modified_base 19: mod_base = cm
  modified_base 19..20: mod_base = OTHER; note = phosphorothioate
  modified_base 20: mod_base = um
  modified_base 20..21: mod_base = OTHER; note = phosphorothioate
  modified_base 21: mod_base = um
  source 1..21: mol_type = other RNA
tcttgatgtagtgggagtctt

SEQ ID NO: 498 - RNA, 21 nt, synthetic construct
  misc_feature 1..21: note = Synthetic: WV-42172
  misc_feature 1..21: note = Synthetic: SSR-0104898
  modified_base 1: mod_base = OTHER; note = 2-fluororibose uracil
  modified_base 1..2: mod_base = OTHER; note = phosphorothioate
  modified_base 2: mod_base = OTHER; note = 2-fluororibose uracil
  modified_base 2..3: mod_base = OTHER; note = phosphorothioate
  modified_base 3: mod_base = cm
  modified_base 4: mod_base = OTHER; note = 2-fluororibose uracil
  modified_base 5: mod_base = um
  modified_base 6: mod_base = OTHER; note = 2-fluororibose guanine
  modified_base 7: mod_base = OTHER; note = 2-O-methylribose adenine
  modified_base 8: mod_base = OTHER; note = 2-fluororibose uracil
  modified_base 9: mod_base = gm
  modified_base 10: mod_base = OTHER; note = 2-fluororibose uracil
  modified_base 11: mod_base = OTHER; note = 2-O-methylribose adenine
  modified_base 12: mod_base = gm
  modified_base 13: mod_base = um
  modified_base 14: mod_base = OTHER; note = 2-fluororibose guanine
  modified_base 15: mod_base = gm
  modified_base 16: mod_base = OTHER; note = 2-fluororibose guanine
  modified_base 17: mod_base = OTHER; note = 2-O-methylribose adenine
  modified_base 18: mod_base = OTHER; note = 2-fluororibose guanine
  modified_base 19: mod_base = um
  modified_base 19..20: mod_base = OTHER; note = phosphorothioate
  modified_base 20: mod_base = um
  modified_base 20..21: mod_base = OTHER; note = phosphorothioate
  modified_base 21: mod_base = um
  source 1..21: mol_type = other RNA
ttcttgatgtagtgggagttt

SEQ ID NO: 499 - RNA, 21 nt, synthetic construct
  misc_feature 1..21: note = Synthetic: WV-42173
  misc_feature 1..21: note = Synthetic: SSR-0104882
  modified_base 1: mod_base = OTHER; note = 2-fluororibose uracil
  modified_base 1..2: mod_base = OTHER; note = phosphorothioate
  modified_base 2: mod_base = OTHER; note = 2-fluororibose guanine
  modified_base 2..3: mod_base = OTHER; note = phosphorothioate
  modified_base 3: mod_base = um
  modified_base 4: mod_base = OTHER; note = 2-fluororibose cytosine
  modified_base 5: mod_base = um
  modified_base 6: mod_base = OTHER; note = 2-fluororibose uracil
  modified_base 7: mod_base = gm
  modified_base 8: mod_base = OTHER; note = 2-fluororibose adenine
  modified_base 9: mod_base = um
  modified_base 10: mod_base = OTHER; note = 2-fluororibose guanine
  modified_base 11: mod_base = um
  modified_base 12: mod_base = OTHER; note = 2-O-methylribose adenine
  modified_base 13: mod_base = gm
  modified_base 14: mod_base = OTHER; note = 2-fluororibose uracil
  modified_base 15: mod_base = gm
  modified_base 16: mod_base = OTHER; note = 2-fluororibose guanine
  modified_base 17: mod_base = gm
  modified_base 18: mod_base = OTHER; note = 2-fluororibose adenine
  modified_base 19: mod_base = gm
  modified_base 19..20: mod_base = OTHER; note = phosphorothioate
  modified_base 20: mod_base = um
  modified_base 20..21: mod_base = OTHER; note = phosphorothioate
  modified_base 21: mod_base = um
  source 1..21: mol_type = other RNA
tgtcttgatgtagtgggagtt

SEQ ID NO: 500 - RNA, 21 nt, synthetic construct
  misc_feature 1..21: note = Synthetic: WV-42174
  misc_feature 1..21: note = Synthetic: SSR-0104849
  modified_base 1: mod_base = OTHER; note = 2-fluororibose uracil
  modified_base 1..2: mod_base = OTHER; note = phosphorothioate
  modified_base 2: mod_base = OTHER; note = 2-fluororibose adenine
  modified_base 2..3: mod_base = OTHER; note = phosphorothioate
  modified_base 3: mod_base = gm
  modified_base 4: mod_base = OTHER; note = 2-fluororibose uracil
  modified_base 5: mod_base = cm
  modified_base 6: mod_base = OTHER; note = 2-fluororibose uracil
  modified_base 7: mod_base = um
  modified_base 8: mod_base = OTHER; note = 2-fluororibose guanine
  modified_base 9: mod_base = OTHER; note = 2-O-methylribose adenine
  modified_base 10: mod_base = OTHER; note = 2-fluororibose uracil
  modified_base 11: mod_base = gm
  modified_base 12: mod_base = um
  modified_base 13: mod_base = OTHER; note = 2-O-methylribose adenine
  modified_base 14: mod_base = OTHER; note = 2-fluororibose guanine
  modified_base 15: mod_base = um
  modified_base 16: mod_base = OTHER; note = 2-fluororibose guanine
  modified_base 17: mod_base = gm
  modified_base 18: mod_base = OTHER; note = 2-fluororibose guanine
  modified_base 19: mod_base = OTHER; note = 2-O-methylribose adenine
  modified_base 19..20: mod_base = OTHER; note = phosphorothioate
  modified_base 20: mod_base = um
  modified_base 20..21: mod_base = OTHER; note = phosphorothioate
  modified_base 21: mod_base = um
  source 1..21: mol_type = other RNA
tagtcttgatgtagtgggatt

SEQ ID NO: 501 - RNA, 21 nt, synthetic construct
  misc_feature 1..21: note = Synthetic: WV-42175
  misc_feature 1..21: note = Synthetic: SSR-0104906
  modified_base 1: mod_base = OTHER; note = 2-fluororibose uracil
  modified_base 1..2: mod_base = OTHER; note = phosphorothioate
  modified_base 2: mod_base = OTHER; note = 2-fluororibose uracil
  modified_base 2..3: mod_base = OTHER; note = phosphorothioate
  modified_base 3: mod_base = um
  modified_base 4: mod_base = OTHER; note = 2-fluororibose adenine
  modified_base 5: mod_base = gm
  modified_base 6: mod_base = OTHER; note = 2-fluororibose uracil
  modified_base 7: mod_base = cm
  modified_base 8: mod_base = OTHER; note = 2-fluororibose uracil
  modified_base 9: mod_base = um
  modified_base 10: mod_base = OTHER; note = 2-fluororibose guanine
  modified_base 11: mod_base = OTHER; note = 2-O-methylribose adenine
  modified_base 12: mod_base = um
  modified_base 13: mod_base = gm
  modified_base 14: mod_base = OTHER; note = 2-fluororibose uracil
  modified_base 15: mod_base = OTHER; note = 2-O-methylribose adenine
  modified_base 16: mod_base = OTHER; note = 2-fluororibose guanine
  modified_base 17: mod_base = um
  modified_base 18: mod_base = OTHER; note = 2-fluororibose guanine
  modified_base 19: mod_base = gm
  modified_base 19..20: mod_base = OTHER; note = phosphorothioate
  modified_base 20: mod_base = um
  modified_base 20..21: mod_base = OTHER; note = phosphorothioate
  modified_base 21: mod_base = um
  source 1..21: mol_type = other RNA
tttagtcttgatgtagtggtt

SEQ ID NO: 502 - RNA, 21 nt, synthetic construct
  misc_feature 1..21: note = Synthetic: WV-42176
  misc_feature 1..21: note = Synthetic: SSR-0104857
  modified_base 1: mod_base = OTHER; note = 2-fluororibose uracil
  modified_base 1..2: mod_base = OTHER; note = phosphorothioate
  modified_base 2: mod_base = OTHER; note = 2-fluororibose adenine
  modified_base 2..3: mod_base = OTHER; note = phosphorothioate
  modified_base 3: mod_base = um
  modified_base 4: mod_base = OTHER; note = 2-fluororibose uracil
  modified_base 5: mod_base = OTHER; note = 2-O-methylribose adenine
  modified_base 6: mod_base = OTHER; note = 2-fluororibose guanine
  modified_base 7: mod_base = um
  modified_base 8: mod_base = OTHER; note = 2-fluororibose cytosine
  modified_base 9: mod_base = um
  modified_base 10: mod_base = OTHER; note = 2-fluororibose uracil
  modified_base 11: mod_base = gm
  modified_base 12: mod_base = OTHER; note = 2-O-methylribose adenine
  modified_base 13: mod_base = um
  modified_base 14: mod_base = OTHER; note = 2-fluororibose guanine
  modified_base 15: mod_base = um
  modified_base 16: mod_base = OTHER; note = 2-fluororibose adenine
  modified_base 17: mod_base = gm
  modified_base 18: mod_base = OTHER; note = 2-fluororibose uracil
  modified_base 19: mod_base = gm
  modified_base 19..20: mod_base = OTHER; note = phosphorothioate
  modified_base 20: mod_base = um
  modified_base 20..21: mod_base = OTHER; note = phosphorothioate
  modified_base 21: mod_base = um
  source 1..21: mol_type = other RNA
tattagtcttgatgtagtgtt

SEQ ID NO: 503 - RNA, 21 nt, synthetic construct
  misc_feature 1..21: note = Synthetic: WV-42177
  misc_feature 1..21: note = Synthetic: SSR-0104876
  modified_base 1: mod_base = OTHER; note = 2-fluororibose uracil
  modified_base 1..2: mod_base = OTHER; note = phosphorothioate
  modified_base 2: mod_base = OTHER; note = 2-fluororibose guanine
  modified_base 2..3: mod_base = OTHER; note = phosphorothioate
  modified_base 3: mod_base = OTHER; note = 2-O-methylribose adenine
  modified_base 4: mod_base = OTHER; note = 2-fluororibose uracil
  modified_base 5: mod_base = um
  modified_base 6: mod_base = OTHER; note = 2-fluororibose adenine
  modified_base 7: mod_base = gm
  modified_base 8: mod_base = OTHER; note = 2-fluororibose uracil
  modified_base 9: mod_base = cm
  modified_base 10: mod_base = OTHER; note = 2-fluororibose uracil
  modified_base 11: mod_base = um
  modified_base 12: mod_base = gm
  modified_base 13: mod_base = OTHER; note = 2-O-methylribose adenine
  modified_base 14: mod_base = OTHER; note = 2-fluororibose uracil
  modified_base 15: mod_base = gm
  modified_base 16: mod_base = OTHER; note = 2-fluororibose uracil
  modified_base 17: mod_base = OTHER; note = 2-O-methylribose adenine
  modified_base 18: mod_base = OTHER; note = 2-fluororibose guanine
  modified_base 19: mod_base = um
  modified_base 19..20: mod_base = OTHER; note = phosphorothioate
  modified_base 20: mod_base = um
  modified_base 20..21: mod_base = OTHER; note = phosphorothioate
  modified_base 21: mod_base = um
  source 1..21: mol_type = other RNA
tgattagtcttgatgtagttt

SEQ ID NO: 504 - RNA, 21 nt, synthetic construct
  misc_feature 1..21: note = Synthetic: WV-42178
  misc_feature 1..21: note = Synthetic: SSR-0104846
  modified_base 1: mod_base = OTHER; note = 2-fluororibose uracil
  modified_base 1..2: mod_base = OTHER; note = phosphorothioate
  modified_base 2: mod_base = OTHER; note = 2-fluororibose adenine
  modified_base 2..3: mod_base = OTHER; note = phosphorothioate
  modified_base 3: mod_base = gm
  modified_base 4: mod_base = OTHER; note = 2-fluororibose adenine
  modified_base 5: mod_base = um
  modified_base 6: mod_base = OTHER; note = 2-fluororibose uracil
  modified_base 7: mod_base = OTHER; note = 2-O-methylribose adenine
  modified_base 8: mod_base = OTHER; note = 2-fluororibose guanine
  modified_base 9: mod_base = um
  modified_base 10: mod_base = OTHER; note = 2-fluororibose cytosine
  modified_base 11: mod_base = um
  modified_base 12: mod_base = um
  modified_base 13: mod_base = gm
  modified_base 14: mod_base = OTHER; note = 2-fluororibose adenine
  modified_base 15: mod_base = um
  modified_base 16: mod_base = OTHER; note = 2-fluororibose guanine
  modified_base 17: mod_base = um
  modified_base 18: mod_base = OTHER; note = 2-fluororibose adenine
  modified_base 19: mod_base = gm
  modified_base 19..20: mod_base = OTHER; note = phosphorothioate
  modified_base 20: mod_base = um
  modified_base 20..21: mod_base = OTHER; note = phosphorothioate
  modified_base 21: mod_base = um
  source 1..21: mol_type = other RNA
tagattagtcttgatgtagtt

SEQ ID NO: 505 - RNA, 21 nt, synthetic construct
  misc_feature 1..21: note = Synthetic: WV-42179
  misc_feature 1..21: note = Synthetic: SSR-0104863
  modified_base 1: mod_base = OTHER; note = 2-fluororibose uracil
  modified_base 1..2: mod_base = OTHER; note = phosphorothioate
  modified_base 2: mod_base = OTHER; note = 2-fluororibose cytosine
  modified_base 2..3: mod_base = OTHER; note = phosphorothioate
  modified_base 3: mod_base = OTHER; note = 2-O-methylribose adenine
  modified_base 4: mod_base = OTHER; note = 2-fluororibose adenine
  modified_base 5: mod_base = gm
  modified_base 6: mod_base = OTHER; note = 2-fluororibose adenine
  modified_base 7: mod_base = um
  modified_base 8: mod_base = OTHER; note = 2-fluororibose uracil
  modified_base 9: mod_base = OTHER; note = 2-O-methylribose adenine
  modified_base 10: mod_base = OTHER; note = 2-fluororibose guanine
  modified_base 11: mod_base = um
  modified_base 12: mod_base = cm
  modified_base 13: mod_base = um
  modified_base 14: mod_base = OTHER; note = 2-fluororibose uracil
  modified_base 15: mod_base = gm
  modified_base 16: mod_base = OTHER; note = 2-fluororibose adenine
  modified_base 17: mod_base = um
  modified_base 18: mod_base = OTHER; note = 2-fluororibose guanine
  modified_base 19: mod_base = um
  modified_base 19..20: mod_base = OTHER; note = phosphorothioate
  modified_base 20: mod_base = um
  modified_base 20..21: mod_base = OTHER; note = phosphorothioate
  modified_base 21: mod_base = um
  source 1..21: mol_type = other RNA
tcaagattagtcttgatgttt

SEQ ID NO: 506 - RNA, 21 nt, synthetic construct
  misc_feature 1..21: note = Synthetic: WV-42180
  misc_feature 1..21: note = Synthetic: SSR-0104839
  modified_base 1: mod_base = OTHER; note = 2-fluororibose uracil
  modified_base 1..2: mod_base = OTHER; note = phosphorothioate
  modified_base 2: mod_base = OTHER; note = 2-fluororibose adenine
  modified_base 2..3: mod_base = OTHER; note = phosphorothioate
  modified_base 3: mod_base = cm
  modified_base 4: mod_base = OTHER; note = 2-fluororibose adenine
  modified_base 5: mod_base = OTHER; note = 2-O-methylribose adenine
  modified_base 6: mod_base = OTHER; note = 2-fluororibose guanine
  modified_base 7: mod_base = OTHER; note = 2-O-methylribose adenine
  modified_base 8: mod_base = OTHER; note = 2-fluororibose uracil
  modified_base 9: mod_base = um
  modified_base 10: mod_base = OTHER; note = 2-fluororibose adenine
  modified_base 11: mod_base = gm
  modified_base 12: mod_base = um
  modified_base 13: mod_base = cm
  modified_base 14: mod_base = OTHER; note = 2-fluororibose uracil
  modified_base 15: mod_base = um
  modified_base 16: mod_base = OTHER; note = 2-fluororibose guanine
  modified_base 17: mod_base = OTHER; note = 2-O-methylribose adenine
  modified_base 18: mod_base = OTHER; note = 2-fluororibose uracil
  modified_base 19: mod_base = gm
  modified_base 19..20: mod_base = OTHER; note = phosphorothioate
  modified_base 20: mod_base = um
  modified_base 20..21: mod_base = OTHER; note = phosphorothioate
  modified_base 21: mod_base = um
  source 1..21: mol_type = other RNA
tacaagattagtcttgatgtt

SEQ ID NO: 507 - RNA, 21 nt, synthetic construct
  misc_feature 1..21: note = Synthetic: WV-42181
  misc_feature 1..21: note = Synthetic: SSR-0104841
  modified_base 1: mod_base = OTHER; note = 2-fluororibose uracil
  modified_base 1..2: mod_base = OTHER; note = phosphorothioate
  modified_base 2: mod_base = OTHER; note = 2-fluororibose adenine
  modified_base 2..3: mod_base = OTHER; note = phosphorothioate
  modified_base 3: mod_base = cm
  modified_base 4: mod_base = OTHER; note = 2-fluororibose adenine
  modified_base 5: mod_base = um
  modified_base 6: mod_base = OTHER; note = 2-fluororibose guanine
  modified_base 7: mod_base = um
  modified_base 8: mod_base = OTHER; note = 2-fluororibose guanine
  modified_base 9: mod_base = OTHER; note = 2-O-methylribose adenine
  modified_base 10: mod_base = OTHER; note = 2-fluororibose adenine
  modified_base 11: mod_base = OTHER; note = 2-O-methylribose adenine
  modified_base 12: mod_base = OTHER; note = 2-O-methylribose adenine
  modified_base 13: mod_base = OTHER; note = 2-O-methylribose adenine
  modified_base 14: mod_base = OTHER; note = 2-fluororibose cytosine
  modified_base 15: mod_base = OTHER; note = 2-O-methylribose adenine
  modified_base 16: mod_base = OTHER; note = 2-fluororibose cytosine
  modified_base 17: mod_base = OTHER; note = 2-O-methylribose adenine
  modified_base 18: mod_base = OTHER; note = 2-fluororibose cytosine
  modified_base 19: mod_base = OTHER; note = 2-O-methylribose adenine
  modified_base 19..20: mod_base = OTHER; note = phosphorothioate
  modified_base 20: mod_base = um
  modified_base 20..21: mod_base = OTHER; note = phosphorothioate
  modified_base 21: mod_base = um
  source 1..21: mol_type = other RNA
tacatgtgaaaaacacacatt

SEQ ID NO: 508 - RNA, 21 nt, synthetic construct
  misc_feature 1..21: note = Synthetic: WV-42182
  misc_feature 1..21: note = Synthetic: SSR-0104853
  modified_base 1: mod_base = OTHER; note = 2-fluororibose uracil
  modified_base 1..2: mod_base = OTHER; note = phosphorothioate
  modified_base 2: mod_base = OTHER; note = 2-fluororibose adenine
  modified_base 2..3: mod_base = OTHER; note = phosphorothioate
  modified_base 3: mod_base = um
  modified_base 4: mod_base = OTHER; note = 2-fluororibose adenine
  modified_base 5: mod_base = cm
  modified_base 6: mod_base = OTHER; note = 2-fluororibose adenine
  modified_base 7: mod_base = um
  modified_base 8: mod_base = OTHER; note = 2-fluororibose guanine
  modified_base 9: mod_base = um
  modified_base 10: mod_base = OTHER; note = 2-fluororibose guanine
  modified_base 11: mod_base = OTHER; note = 2-O-methylribose adenine
  modified_base 12: mod_base = OTHER; note = 2-O-methylribose adenine
  modified_base 13: mod_base = OTHER; note = 2-O-methylribose adenine
  modified_base 14: mod_base = OTHER; note = 2-fluororibose adenine
  modified_base 15: mod_base = OTHER; note = 2-O-methylribose adenine
  modified_base 16: mod_base = OTHER; note = 2-fluororibose cytosine
  modified_base 17: mod_base = OTHER; note = 2-O-methylribose adenine
  modified_base 18: mod_base = OTHER; note = 2-fluororibose cytosine
  modified_base 19: mod_base = OTHER; note = 2-O-methylribose adenine
  modified_base 19..20: mod_base = OTHER; note = phosphorothioate
  modified_base 20: mod_base = um
  modified_base 20..21: mod_base = OTHER; note = phosphorothioate
  modified_base 21: mod_base = um
  source 1..21: mol_type = other RNA
tatacatgtgaaaaacacatt

SEQ ID NO: 509 - RNA, 21 nt, synthetic construct
  misc_feature 1..21: note = Synthetic: WV-42183
  misc_feature 1..21: note = Synthetic: SSR-0104834
  modified_base 1: mod_base = OTHER; note = 2-fluororibose uracil
  modified_base 1..2: mod_base = OTHER; note = phosphorothioate
  modified_base 2: mod_base = OTHER; note = 2-fluororibose adenine
  modified_base 2..3: mod_base = OTHER; note = phosphorothioate
  modified_base 3: mod_base = OTHER; note = 2-O-methylribose adenine
  modified_base 4: mod_base = OTHER; note = 2-fluororibose uracil
  modified_base 5: mod_base = OTHER; note = 2-O-methylribose adenine
  modified_base 6: mod_base = OTHER; note = 2-fluororibose cytosine
  modified_base 7: mod_base = OTHER; note = 2-O-methylribose adenine
  modified_base 8: mod_base = OTHER; note = 2-fluororibose uracil
  modified_base 9: mod_base = gm
  modified_base 10: mod_base = OTHER; note = 2-fluororibose uracil
  modified_base 11: mod_base = gm
  modified_base 12: mod_base = OTHER; note = 2-O-methylribose adenine
  modified_base 13: mod_base = OTHER; note = 2-O-methylribose adenine
  modified_base 14: mod_base = OTHER; note = 2-fluororibose adenine
  modified_base 15: mod_base = OTHER; note = 2-O-methylribose adenine
  modified_base 16: mod_base = OTHER; note = 2-fluororibose adenine
  modified_base 17: mod_base = cm
  modified_base 18: mod_base = OTHER; note = 2-fluororibose adenine
  modified_base 19: mod_base = cm
  modified_base 19..20: mod_base = OTHER; note = phosphorothioate
  modified_base 20: mod_base = um
  modified_base 20..21: mod_base = OTHER; note = phosphorothioate
  modified_base 21: mod_base = um
  source 1..21: mol_type = other RNA
taatacatgtgaaaaacactt

SEQ ID NO: 510 - RNA, 21 nt, synthetic construct
  misc_feature 1..21: note = Synthetic: WV-42184
  misc_feature 1..21: note = Synthetic: SSR-0104852
  modified_base 1: mod_base = OTHER; note = 2-fluororibose uracil
  modified_base 1..2: mod_base = OTHER; note = phosphorothioate
  modified_base 2: mod_base = OTHER; note = 2-fluororibose adenine
  modified_base 2..3: mod_base = OTHER; note = phosphorothioate
  modified_base 3: mod_base = um
  modified_base 4: mod_base = OTHER; note = 2-fluororibose adenine
  modified_base 5: mod_base = OTHER; note = 2-O-methylribose adenine
  modified_base 6: mod_base = OTHER; note = 2-fluororibose uracil
  modified_base 7: mod_base = OTHER; note = 2-O-methylribose adenine
  modified_base 8: mod_base = OTHER; note = 2-fluororibose cytosine
  modified_base 9: mod_base = OTHER; note = 2-O-methylribose adenine
  modified_base 10: mod_base = OTHER; note = 2-fluororibose uracil
  modified_base 11: mod_base = gm
  modified_base 12: mod_base = um
  modified_base 13: mod_base = gm
  modified_base 14: mod_base = OTHER; note = 2-fluororibose adenine
  modified_base 15: mod_base = OTHER; note = 2-O-methylribose adenine
  modified_base 16: mod_base = OTHER; note = 2-fluororibose adenine
  modified_base 17: mod_base = OTHER; note = 2-O-methylribose adenine
  modified_base 18: mod_base = OTHER; note = 2-fluororibose adenine
  modified_base 19: mod_base = cm
  modified_base 19..20: mod_base = OTHER; note = phosphorothioate
  modified_base 20: mod_base = um
  modified_base 20..21: mod_base = OTHER; note = phosphorothioate
  modified_base 21: mod_base = um
  source 1..21: mol_type = other RNA
tataatacatgtgaaaaactt

SEQ ID NO: 511 - RNA, 21 nt, synthetic construct
  misc_feature 1..21: note = Synthetic: WV-42185
  misc_feature 1..21: note = Synthetic: SSR-0104868
  modified_base 1: mod_base = OTHER; note = 2-fluororibose uracil
  modified_base 1..2: mod_base = OTHER; note = phosphorothioate
  modified_base 2: mod_base = OTHER; note = 2-fluororibose cytosine
  modified_base 2..3: mod_base = OTHER; note = phosphorothioate
  modified_base 3: mod_base = um
  modified_base 4: mod_base = OTHER; note = 2-fluororibose adenine
  modified_base 5: mod_base = um
  modified_base 6: mod_base = OTHER; note = 2-fluororibose adenine
  modified_base 7: mod_base = OTHER; note = 2-O-methylribose adenine
  modified_base 8: mod_base = OTHER; note = 2-fluororibose uracil
  modified_base 9: mod_base = OTHER; note = 2-O-methylribose adenine
  modified_base 10: mod_base = OTHER; note = 2-fluororibose cytosine
  modified_base 11: mod_base = OTHER; note = 2-O-methylribose adenine
  modified_base 12: mod_base = um
  modified_base 13: mod_base = gm
  modified_base 14: mod_base = OTHER; note = 2-fluororibose uracil
  modified_base 15: mod_base = gm
  modified_base 16: mod_base = OTHER; note = 2-fluororibose adenine
  modified_base 17: mod_base = OTHER; note = 2-O-methylribose adenine
  modified_base 18: mod_base = OTHER; note = 2-fluororibose adenine
  modified_base 19: mod_base = OTHER; note = 2-O-methylribose adenine
  modified_base 19..20: mod_base = OTHER; note = phosphorothioate
  modified_base 20: mod_base = um
  modified_base 20..21: mod_base = OTHER; note = phosphorothioate
  modified_base 21: mod_base = um
  source 1..21: mol_type = other RNA
tctataatacatgtgaaaatt

SEQ ID NO: 512 - RNA, 21 nt, synthetic construct
  misc_feature 1..21: note = Synthetic: WV-42186
  misc_feature 1..21: note = Synthetic: SSR-0104894
  modified_base 1: mod_base = OTHER; note = 2-fluororibose uracil
  modified_base 1..2: mod_base = OTHER; note = phosphorothioate
  modified_base 2: mod_base = OTHER; note = 2-fluororibose uracil
  modified_base 2..3: mod_base = OTHER; note = phosphorothioate
  modified_base 3: mod_base = cm
  modified_base 4: mod_base = OTHER; note = 2-fluororibose uracil
  modified_base 5: mod_base = OTHER; note = 2-O-methylribose adenine
  modified_base 6: mod_base = OTHER; note = 2-fluororibose uracil
  modified_base 7: mod_base = OTHER; note = 2-O-methylribose adenine
  modified_base 8: mod_base = OTHER; note = 2-fluororibose adenine
  modified_base 9: mod_base = um
  modified_base 10: mod_base = OTHER; note = 2-fluororibose adenine
  modified_base 11: mod_base = cm
  modified_base 12: mod_base = OTHER; note = 2-O-methylribose adenine
  modified_base 13: mod_base = um
  modified_base 14: mod_base = OTHER; note = 2-fluororibose guanine
  modified_base 15: mod_base = um
  modified_base 16: mod_base = OTHER; note = 2-fluororibose guanine
  modified_base 17: mod_base = OTHER; note = 2-O-methylribose adenine
  modified_base 18: mod_base = OTHER; note = 2-fluororibose adenine
  modified_base 19: mod_base = OTHER; note = 2-O-methylribose adenine
  modified_base 19..20: mod_base = OTHER; note = phosphorothioate
  modified_base 20: mod_base = um
  modified_base 20..21: mod_base = OTHER; note = phosphorothioate
  modified_base 21: mod_base = um
  source 1..21: mol_type = other RNA
ttctataatacatgtgaaatt

SEQ ID NO: 513 - RNA, 21 nt, synthetic construct
  misc_feature 1..21: note = Synthetic: WV-42187
  misc_feature 1..21: note = Synthetic: SSR-0104877
  modified_base 1: mod_base = OTHER; note = 2-fluororibose uracil
  modified_base 1..2: mod_base = OTHER; note = phosphorothioate
  modified_base 2: mod_base = OTHER; note = 2-fluororibose guanine
  modified_base 2..3: mod_base = OTHER; note = phosphorothioate
  modified_base 3: mod_base = cm
  modified_base 4: mod_base = OTHER; note = 2-fluororibose adenine
  modified_base 5: mod_base = um
  modified_base 6: mod_base = OTHER; note = 2-fluororibose uracil
  modified_base 7: mod_base = cm
  modified_base 8: mod_base = OTHER; note = 2-fluororibose uracil
  modified_base 9: mod_base = OTHER; note = 2-O-methylribose adenine
  modified_base 10: mod_base = OTHER; note = 2-fluororibose uracil
  modified_base 11: mod_base = OTHER; note = 2-O-methylribose adenine
  modified_base 12: mod_base = OTHER; note = 2-O-methylribose adenine
  modified_base 13: mod_base = um
  modified_base 14: mod_base = OTHER; note = 2-fluororibose adenine
  modified_base 15: mod_base = cm
  modified_base 16: mod_base = OTHER; note = 2-fluororibose adenine
  modified_base 17: mod_base = um
  modified_base 18: mod_base = OTHER; note = 2-fluororibose guanine
  modified_base 19: mod_base = um
  modified_base 19..20: mod_base = OTHER; note = phosphorothioate
  modified_base 20: mod_base = um
  modified_base 20..21: mod_base = OTHER; note = phosphorothioate
  modified_base 21: mod_base = um
  source 1..21: mol_type = other RNA
tgcattctataatacatgttt

SEQ ID NO: 514 - RNA, 21 nt, synthetic construct
  misc_feature 1..21: note = Synthetic: WV-42188
  misc_feature 1..21: note = Synthetic: SSR-0104829
  modified_base 1: mod_base = OTHER; note = 2-fluororibose uracil
  modified_base 1..2: mod_base = OTHER; note = phosphorothioate
  modified_base 2: mod_base = OTHER; note = 2-fluororibose adenine
  modified_base 2..3: mod_base = OTHER; note = phosphorothioate
  modified_base 3: mod_base = OTHER; note = 2-O-methylribose adenine
  modified_base 4: mod_base = OTHER; note = 2-fluororibose guanine
  modified_base 5: mod_base = cm
  modified_base 6: mod_base = OTHER; note = 2-fluororibose adenine
  modified_base 7: mod_base = um
  modified_base 8: mod_base = OTHER; note = 2-fluororibose uracil
  modified_base 9: mod_base = cm
  modified_base 10: mod_base = OTHER; note = 2-fluororibose uracil
  modified_base 11: mod_base = OTHER; note = 2-O-methylribose adenine
  modified_base 12: mod_base = um
  modified_base 13: mod_base = OTHER; note = 2-O-methylribose adenine
  modified_base 14: mod_base = OTHER; note = 2-fluororibose adenine
  modified_base 15: mod_base = um
  modified_base 16: mod_base = OTHER; note = 2-fluororibose adenine
  modified_base 17: mod_base = cm
  modified_base 18: mod_base = OTHER; note = 2-fluororibose adenine
  modified_base 19: mod_base = um
  modified_base 19..20: mod_base = OTHER; note = phosphorothioate
  modified_base 20: mod_base = um
  modified_base 20..21: mod_base = OTHER; note = phosphorothioate
  modified_base 21: mod_base = um
  source 1..21: mol_type = other RNA
taagcattctataatacattt

SEQ ID NO: 515 - RNA, 21 nt, synthetic construct
  misc_feature 1..21: note = Synthetic: WV-42189
  misc_feature 1..21: note = Synthetic: SSR-0104860
  modified_base 1: mod_base = OTHER; note = 2-fluororibose uracil
  modified_base 1..2: mod_base = OTHER; note = phosphorothioate
  modified_base 2: mod_base = OTHER; note = 2-fluororibose cytosine
  modified_base 2..3: mod_base = OTHER; note = phosphorothioate
  modified_base 3: mod_base = OTHER; note = 2-O-methylribose adenine
  modified_base 4: mod_base = OTHER; note = 2-fluororibose adenine
  modified_base 5: mod_base = OTHER; note = 2-O-methylribose adenine
  modified_base 6: mod_base = OTHER; note = 2-fluororibose adenine
  modified_base 7: mod_base = gm
  modified_base 8: mod_base = OTHER; note = 2-fluororibose cytosine
  modified_base 9: mod_base = OTHER; note = 2-O-methylribose adenine
  modified_base 10: mod_base = OTHER; note = 2-fluororibose uracil
  modified_base 11: mod_base = um
  modified_base 12: mod_base = cm
  modified_base 13: mod_base = um
  modified_base 14: mod_base = OTHER; note = 2-fluororibose adenine
  modified_base 15: mod_base = um
  modified_base 16: mod_base = OTHER; note = 2-fluororibose adenine
  modified_base 17: mod_base = OTHER; note = 2-O-methylribose adenine
  modified_base 18: mod_base = OTHER; note = 2-fluororibose uracil
  modified_base 19: mod_base = OTHER; note = 2-O-methylribose adenine
  modified_base 19..20: mod_base = OTHER; note = phosphorothioate
  modified_base 20: mod_base = um
  modified_base 20..21: mod_base = OTHER; note = phosphorothioate
  modified_base 21: mod_base = um
  source 1..21: mol_type = other RNA
tcaaaagcattctataatatt

SEQ ID NO: 516 - RNA, 21 nt, synthetic construct
  misc_feature 1..21: note = Synthetic: WV-42190
  misc_feature 1..21: note = Synthetic: SSR-0104856
  modified_base 1: mod_base = OTHER; note = 2-fluororibose uracil
  modified_base 1..2: mod_base = OTHER; note = phosphorothioate
  modified_base 2: mod_base = OTHER; note = 2-fluororibose adenine
  modified_base 2..3: mod_base = OTHER; note = phosphorothioate
  modified_base 3: mod_base = um
  modified_base 4: mod_base = OTHER; note = 2-fluororibose guanine
  modified_base 5: mod_base = cm
  modified_base 6: mod_base = OTHER; note = 2-fluororibose adenine
  modified_base 7: mod_base = OTHER; note = 2-O-methylribose adenine
  modified_base 8: mod_base = OTHER; note = 2-fluororibose adenine
  modified_base 9: mod_base = OTHER; note = 2-O-methylribose adenine
  modified_base 10: mod_base = OTHER; note = 2-fluororibose guanine
  modified_base 11: mod_base = cm
  modified_base 12: mod_base = OTHER; note = 2-O-methylribose adenine
  modified_base 13: mod_base = um
  modified_base 14: mod_base = OTHER; note = 2-fluororibose uracil
  modified_base 15: mod_base = cm
  modified_base 16: mod_base = OTHER; note = 2-fluororibose uracil
  modified_base 17: mod_base = OTHER; note = 2-O-methylribose adenine
  modified_base 18: mod_base = OTHER; note = 2-fluororibose uracil
  modified_base 19: mod_base = OTHER; note = 2-O-methylribose adenine
  modified_base 19..20: mod_base = OTHER; note = phosphorothioate
  modified_base 20: mod_base = um
  modified_base 20..21: mod_base = OTHER; note = phosphorothioate
  modified_base 21: mod_base = um
  source 1..21: mol_type = other RNA
tatgcaaaagcattctatatt

SEQ ID NO: 517 - RNA, 21 nt, synthetic construct
  misc_feature 1..21: note = Synthetic: WV-42191
  misc_feature 1..21: note = Synthetic: SSR-0104867
  modified_base 1: mod_base = OTHER; note = 2-fluororibose uracil
  modified_base 1..2: mod_base = OTHER; note = phosphorothioate
  modified_base 2: mod_base = OTHER; note = 2-fluororibose cytosine
  modified_base 2..3: mod_base = OTHER; note = phosphorothioate
  modified_base 3: mod_base = cm
  modified_base 4: mod_base = OTHER; note = 2-fluororibose adenine
  modified_base 5: mod_base = um
  modified_base 6: mod_base = OTHER; note = 2-fluororibose guanine
  modified_base 7: mod_base = cm
  modified_base 8: mod_base = OTHER; note = 2-fluororibose adenine
  modified_base 9: mod_base = OTHER; note = 2-O-methylribose adenine
  modified_base 10: mod_base = OTHER; note = 2-fluororibose adenine
  modified_base 11: mod_base = OTHER; note = 2-O-methylribose adenine
  modified_base 12: mod_base = gm
  modified_base 13: mod_base = cm
  modified_base 14: mod_base = OTHER; note = 2-fluororibose adenine
  modified_base 15: mod_base = um
  modified_base 16: mod_base = OTHER; note = 2-fluororibose uracil
  modified_base 17: mod_base = cm
  modified_base 18: mod_base = OTHER; note = 2-fluororibose uracil
  modified_base 19: mod_base = OTHER; note = 2-O-methylribose adenine
  modified_base 19..20: mod_base = OTHER; note = phosphorothioate
  modified_base 20: mod_base = um
  modified_base 20..21: mod_base = OTHER; note = phosphorothioate
  modified_base 21: mod_base = um
  source 1..21: mol_type = other RNA
tccatgcaaaagcattctatt

SEQ ID NO: 518 - RNA, 21 nt, synthetic construct
  misc_feature 1..21: note = Synthetic: WV-42192
  misc_feature 1..21: note = Synthetic: SSR-0104893
  modified_base 1: mod_base = OTHER; note = 2-fluororibose uracil
  modified_base 1..2: mod_base = OTHER; note = phosphorothioate
  modified_base 2: mod_base = OTHER; note = 2-fluororibose uracil
  modified_base 2..3: mod_base = OTHER; note = phosphorothioate
  modified_base 3: mod_base = cm
  modified_base 4: mod_base = OTHER; note = 2-fluororibose cytosine
  modified_base 5: mod_base = OTHER; note = 2-O-methylribose adenine
  modified_base 6: mod_base = OTHER; note = 2-fluororibose uracil
  modified_base 7: mod_base = gm
  modified_base 8: mod_base = OTHER; note = 2-fluororibose cytosine
  modified_base 9: mod_base = OTHER; note = 2-O-methylribose adenine
  modified_base 10: mod_base = OTHER; note = 2-fluororibose adenine
  modified_base 11: mod_base = OTHER; note = 2-O-methylribose adenine
  modified_base 12: mod_base = OTHER; note = 2-O-methylribose adenine
  modified_base 13: mod_base = gm
  modified_base 14: mod_base = OTHER; note = 2-fluororibose cytosine
  modified_base 15: mod_base = OTHER; note = 2-O-methylribose adenine
  modified_base 16: mod_base = OTHER; note = 2-fluororibose uracil
  modified_base 17: mod_base = um
  modified_base 18: mod_base = OTHER; note = 2-fluororibose cytosine
  modified_base 19: mod_base = um
  modified_base 19..20: mod_base = OTHER; note = phosphorothioate
  modified_base 20: mod_base = um
  modified_base 20..21: mod_base = OTHER; note = phosphorothioate
  modified_base 21: mod_base = um
  source 1..21: mol_type = other RNA
ttccatgcaaaagcattcttt

SEQ ID NO: 519 - RNA, 21 nt, synthetic construct
  misc_feature 1..21: note = Synthetic: WV-42193
  misc_feature 1..21: note = Synthetic: SSR-0104881
  modified_base 1: mod_base = OTHER; note = 2-fluororibose uracil
  modified_base 1..2: mod_base = OTHER; note = phosphorothioate
  modified_base 2: mod_base = OTHER; note = 2-fluororibose guanine
  modified_base 2..3: mod_base = OTHER; note = phosphorothioate
  modified_base 3: mod_base = um
  modified_base 4: mod_base = OTHER; note = 2-fluororibose cytosine
  modified_base 5: mod_base = cm
  modified_base 6: mod_base = OTHER; note = 2-fluororibose adenine
  modified_base 7: mod_base = um
  modified_base 8: mod_base = OTHER; note = 2-fluororibose guanine
  modified_base 9: mod_base = cm
  modified_base 10: mod_base = OTHER; note = 2-fluororibose adenine
  modified_base 11: mod_base = OTHER; note = 2-O-methylribose adenine
  modified_base 12: mod_base = OTHER; note = 2-O-methylribose adenine
  modified_base 13: mod_base = OTHER; note = 2-O-methylribose adenine
  modified_base 14: mod_base = OTHER; note = 2-fluororibose guanine
  modified_base 15: mod_base = cm
  modified_base 16: mod_base = OTHER; note = 2-fluororibose adenine
  modified_base 17: mod_base = um
  modified_base 18: mod_base = OTHER; note = 2-fluororibose uracil
  modified_base 19: mod_base = cm
  modified_base 19..20: mod_base = OTHER; note = phosphorothioate
  modified_base 20: mod_base = um
  modified_base 20..21: mod_base = OTHER; note = phosphorothioate
  modified_base 21: mod_base = um
  source 1..21: mol_type = other RNA
tgtccatgcaaaagcattctt

SEQ ID NO: 520 - RNA, 21 nt, synthetic construct
  misc_feature 1..21: note = Synthetic: WV-42194
  misc_feature 1..21: note = Synthetic: SSR-0104848
  modified_base 1: mod_base = OTHER; note = 2-fluororibose uracil
  modified_base 1..2: mod_base = OTHER; note = phosphorothioate
  modified_base 2: mod_base = OTHER; note = 2-fluororibose adenine
  modified_base 2..3: mod_base = OTHER; note = phosphorothioate
  modified_base 3: mod_base = gm
  modified_base 4: mod_base = OTHER; note = 2-fluororibose uracil
  modified_base 5: mod_base = cm
  modified_base 6: mod_base = OTHER; note = 2-fluororibose cytosine
  modified_base 7: mod_base = OTHER; note = 2-O-methylribose adenine
  modified_base 8: mod_base = OTHER; note = 2-fluororibose uracil
  modified_base 9: mod_base = gm
  modified_base 10: mod_base = OTHER; note = 2-fluororibose cytosine
  modified_base 11: mod_base = OTHER; note = 2-O-methylribose adenine
  modified_base 12: mod_base = OTHER; note = 2-O-methylribose adenine
  modified_base 13: mod_base = OTHER; note = 2-O-methylribose adenine
  modified_base 14: mod_base = OTHER; note = 2-fluororibose adenine
  modified_base 15: mod_base = gm
  modified_base 16: mod_base = OTHER; note = 2-fluororibose cytosine
  modified_base 17: mod_base = OTHER; note = 2-O-methylribose adenine
  modified_base 18: mod_base = OTHER; note = 2-fluororibose uracil
  modified_base 19: mod_base = um
  modified_base 19..20: mod_base = OTHER; note = phosphorothioate
  modified_base 20: mod_base = um
  modified_base 20..21: mod_base = OTHER; note = phosphorothioate
  modified_base 21: mod_base = um
  source 1..21: mol_type = other RNA
tagtccatgcaaaagcatttt

SEQ ID NO: 521 - RNA, 21 nt, synthetic construct
  misc_feature 1..21: note = Synthetic: WV-42195
  misc_feature 1..21: note = Synthetic: SSR-0104889
  modified_base 1: mod_base = OTHER; note = 2-fluororibose uracil
  modified_base 1..2: mod_base = OTHER; note = phosphorothioate
  modified_base 2: mod_base = OTHER; note = 2-fluororibose uracil
  modified_base 2..3: mod_base = OTHER; note = phosphorothioate
  modified_base 3: mod_base = OTHER; note = 2-O-methylribose adenine
  modified_base 4: mod_base = OTHER; note = 2-fluororibose guanine
  modified_base 5: mod_base = um
  modified_base 6: mod_base = OTHER; note = 2-fluororibose cytosine
  modified_base 7: mod_base = cm
  modified_base 8: mod_base = OTHER; note = 2-fluororibose adenine
  modified_base 9: mod_base = um
  modified_base 10: mod_base = OTHER; note = 2-fluororibose guanine
  modified_base 11: mod_base = cm
  modified_base 12: mod_base = OTHER; note = 2-O-methylribose adenine
  modified_base 13: mod_base = OTHER; note = 2-O-methylribose adenine
  modified_base 14: mod_base = OTHER; note = 2-fluororibose adenine
  modified_base 15: mod_base = OTHER; note = 2-O-methylribose adenine
  modified_base 16: mod_base = OTHER; note = 2-fluororibose guanine
  modified_base 17: mod_base = cm
  modified_base 18: mod_base = OTHER; note = 2-fluororibose adenine
  modified_base 19: mod_base = um
  modified_base 19..20: mod_base = OTHER; note = phosphorothioate
  modified_base 20: mod_base = um
  modified_base 20..21: mod_base = OTHER; note = phosphorothioate
  modified_base 21: mod_base = um
  source 1..21: mol_type = other RNA
ttagtccatgcaaaagcattt

SEQ ID NO: 522 - RNA, 21 nt, synthetic construct
  misc_feature 1..21: note = Synthetic: WV-42196
  misc_feature 1..21: note = Synthetic: SSR-0104874
  modified_base 1: mod_base = OTHER; note = 2-fluororibose uracil
  modified_base 1..2: mod_base = OTHER; note = phosphorothioate
  modified_base 2: mod_base = OTHER; note = 2-fluororibose guanine
  modified_base 2..3: mod_base = OTHER; note = phosphorothioate
  modified_base 3: mod_base = OTHER; note = 2-O-methylribose adenine
  modified_base 4: mod_base = OTHER; note = 2-fluororibose uracil
  modified_base 5: mod_base = OTHER; note = 2-O-methylribose adenine
  modified_base 6: mod_base = OTHER; note = 2-fluororibose guanine
  modified_base 7: mod_base = um
  modified_base 8: mod_base = OTHER; note = 2-fluororibose cytosine
  modified_base 9: mod_base = cm
  modified_base 10: mod_base = OTHER; note = 2-fluororibose adenine
  modified_base 11: mod_base = um
  modified_base 12: mod_base = gm
  modified_base 13: mod_base = cm
  modified_base 14: mod_base = OTHER; note = 2-fluororibose adenine
  modified_base 15: mod_base = OTHER; note = 2-O-methylribose adenine
  modified_base 16: mod_base = OTHER; note = 2-fluororibose adenine
  modified_base 17: mod_base = OTHER; note = 2-O-methylribose adenine
  modified_base 18: mod_base = OTHER; note = 2-fluororibose guanine
  modified_base 19: mod_base = cm
  modified_base 19..20: mod_base = OTHER; note = phosphorothioate
  modified_base 20: mod_base = um
  modified_base 20..21: mod_base = OTHER; note = phosphorothioate
  modified_base 21: mod_base = um
  source 1..21: mol_type = other RNA
tgatagtccatgcaaaagctt

SEQ ID NO: 523 - RNA, 21 nt, synthetic construct
  misc_feature 1..21: note = Synthetic: WV-42197
  misc_feature 1..21: note = Synthetic: SSR-0104878
  modified_base 1: mod_base = OTHER; note = 2-fluororibose uracil
  modified_base 1..2: mod_base = OTHER; note = phosphorothioate
  modified_base 2: mod_base = OTHER; note = 2-fluororibose guanine
  modified_base 2..3: mod_base = OTHER; note = phosphorothioate
  modified_base 3: mod_base = gm
  modified_base 4: mod_base = OTHER; note = 2-fluororibose adenine
  modified_base 5: mod_base = um
  modified_base 6: mod_base = OTHER; note = 2-fluororibose adenine
  modified_base 7: mod_base = gm
  modified_base 8: mod_base = OTHER; note = 2-fluororibose uracil
  modified_base 9: mod_base = cm
  modified_base 10: mod_base = OTHER; note = 2-fluororibose cytosine
  modified_base 11: mod_base = OTHER; note = 2-O-methylribose adenine
  modified_base 12: mod_base = um
  modified_base 13: mod_base = gm
  modified_base 14: mod_base = OTHER; note = 2-fluororibose cytosine
  modified_base 15: mod_base = OTHER; note = 2-O-methylribose adenine
  modified_base 16: mod_base = OTHER; note = 2-fluororibose adenine
  modified_base 17: mod_base = OTHER; note = 2-O-methylribose adenine
  modified_base 18: mod_base = OTHER; note = 2-fluororibose adenine
  modified_base 19: mod_base = gm
  modified_base 19..20: mod_base = OTHER; note = phosphorothioate
  modified_base 20: mod_base = um
  modified_base 20..21: mod_base = OTHER; note = phosphorothioate
  modified_base 21: mod_base = um
  source 1..21: mol_type = other RNA
tggatagtccatgcaaaagtt

SEQ ID NO: 524 - RNA, 21 nt, synthetic construct
  misc_feature 1..21: note = Synthetic: WV-42198
  misc_feature 1..21: note = Synthetic: SSR-0104847
  modified_base 1: mod_base = OTHER; note = 2-fluororibose uracil
  modified_base 1..2: mod_base = OTHER; note = phosphorothioate
  modified_base 2: mod_base = OTHER; note = 2-fluororibose adenine
  modified_base 2..3: mod_base = OTHER; note = phosphorothioate
  modified_base 3: mod_base = gm
  modified_base 4: mod_base = OTHER; note = 2-fluororibose guanine
  modified_base 5: mod_base = OTHER; note = 2-O-methylribose adenine
  modified_base 6: mod_base = OTHER; note = 2-fluororibose uracil
  modified_base 7: mod_base = OTHER; note = 2-O-methylribose adenine
  modified_base 8: mod_base = OTHER; note = 2-fluororibose guanine
  modified_base 9: mod_base = um
  modified_base 10: mod_base = OTHER; note = 2-fluororibose cytosine
  modified_base 11: mod_base = cm
  modified_base 12: mod_base = OTHER; note = 2-O-methylribose adenine
  modified_base 13: mod_base = um
  modified_base 14: mod_base = OTHER; note = 2-fluororibose guanine
  modified_base 15: mod_base = cm
  modified_base 16: mod_base = OTHER; note = 2-fluororibose adenine
  modified_base 17: mod_base = OTHER; note = 2-O-methylribose adenine
  modified_base 18: mod_base = OTHER; note = 2-fluororibose adenine
  modified_base 19: mod_base = OTHER; note = 2-O-methylribose adenine
  modified_base 19..20: mod_base = OTHER; note = phosphorothioate
  modified_base 20: mod_base = um
  modified_base 20..21: mod_base = OTHER; note = phosphorothioate
  modified_base 21: mod_base = um
  source 1..21: mol_type = other RNA
taggatagtccatgcaaaatt

SEQ ID NO: 525 - RNA, 21 nt, synthetic construct
  misc_feature 1..21: note = Synthetic: WV-42199
  misc_feature 1..21: note = Synthetic: SSR-0104844
  modified_base 1: mod_base = OTHER; note = 2-fluororibose uracil
  modified_base 1..2: mod_base = OTHER; note = phosphorothioate
  modified_base 2: mod_base = OTHER; note = 2-fluororibose adenine
  modified_base 2..3: mod_base = OTHER; note = phosphorothioate
  modified_base 3: mod_base = gm
  modified_base 4: mod_base = OTHER; note = 2-fluororibose adenine
  modified_base 5: mod_base = gm
  modified_base 6: mod_base = OTHER; note = 2-fluororibose guanine
  modified_base 7: mod_base = OTHER; note = 2-O-methylribose adenine
  modified_base 8: mod_base = OTHER; note = 2-fluororibose uracil
  modified_base 9: mod_base = OTHER; note = 2-O-methylribose adenine
  modified_base 10: mod_base = OTHER; note = 2-fluororibose guanine
  modified_base 11: mod_base = um
  modified_base 12: mod_base = cm
  modified_base 13: mod_base = cm
  modified_base 14: mod_base = OTHER; note = 2-fluororibose adenine
  modified_base 15: mod_base = um
  modified_base 16: mod_base = OTHER; note = 2-fluororibose guanine
  modified_base 17: mod_base = cm
  modified_base 18: mod_base = OTHER; note = 2-fluororibose adenine
  modified_base 19: mod_base = OTHER; note = 2-O-methylribose adenine
  modified_base 19..20: mod_base = OTHER; note = phosphorothioate
  modified_base 20: mod_base = um
  modified_base 20..21: mod_base = OTHER; note = phosphorothioate
  modified_base 21: mod_base = um
  source 1..21: mol_type = other RNA
tagaggatagtccatgcaatt

SEQ ID NO: 526 - RNA, 21 nt, synthetic construct
  misc_feature 1..21: note = Synthetic: WV-42200
  misc_feature 1..21: note = Synthetic: SSR-0104828
  modified_base 1: mod_base = OTHER; note = 2-fluororibose uracil
  modified_base 1..2: mod_base = OTHER; note = phosphorothioate
  modified_base 2: mod_base = OTHER; note = 2-fluororibose adenine
  modified_base 2..3: mod_base = OTHER; note = phosphorothioate
  modified_base 3: mod_base = OTHER; note = 2-O-methylribose adenine
  modified_base 4: mod_base = OTHER; note = 2-fluororibose guanine
  modified_base 5: mod_base = OTHER; note = 2-O-methylribose adenine
  modified_base 6: mod_base = OTHER; note = 2-fluororibose guanine
  modified_base 7: mod_base = gm
  modified_base 8: mod_base = OTHER; note = 2-fluororibose adenine
  modified_base 9: mod_base = um
  modified_base 10: mod_base = OTHER; note = 2-fluororibose adenine
  modified_base 11: mod_base = gm
  modified_base 12: mod_base = um
  modified_base 13: mod_base = cm
  modified_base 14: mod_base = OTHER; note = 2-fluororibose cytosine
  modified_base 15: mod_base = OTHER; note = 2-O-methylribose adenine
  modified_base 16: mod_base = OTHER; note = 2-fluororibose uracil
  modified_base 17: mod_base = gm
  modified_base 18: mod_base = OTHER; note = 2-fluororibose cytosine
  modified_base 19: mod_base = OTHER; note = 2-O-methylribose adenine
  modified_base 19..20: mod_base = OTHER; note = phosphorothioate
  modified_base 20: mod_base = um
  modified_base 20..21: mod_base = OTHER; note = phosphorothioate
  modified_base 21: mod_base = um
  source 1..21: mol_type = other RNA
taagaggatagtccatgcatt

SEQ ID NO: 527 - RNA, 21 nt, synthetic construct
  misc_feature 1..21: note = Synthetic: WV-42201
  misc_feature 1..21: note = Synthetic: SSR-0104862
  modified_base 1: mod_base = OTHER; note = 2-fluororibose uracil
  modified_base 1..2: mod_base = OTHER; note = phosphorothioate
  modified_base 2: mod_base = OTHER; note = 2-fluororibose cytosine
  modified_base 2..3: mod_base = OTHER; note = phosphorothioate
  modified_base 3: mod_base = OTHER; note = 2-O-methylribose adenine
  modified_base 4: mod_base = OTHER; note = 2-fluororibose adenine
  modified_base 5: mod_base = gm
  modified_base 6: mod_base = OTHER; note = 2-fluororibose adenine
  modified_base 7: mod_base = gm
  modified_base 8: mod_base = OTHER; note = 2-fluororibose guanine
  modified_base 9: mod_base = OTHER; note = 2-O-methylribose adenine
  modified_base 10: mod_base = OTHER; note = 2-fluororibose uracil
  modified_base 11: mod_base = OTHER; note = 2-O-methylribose adenine
  modified_base 12: mod_base = gm
  modified_base 13: mod_base = um
  modified_base 14: mod_base = OTHER; note = 2-fluororibose cytosine
  modified_base 15: mod_base = cm
  modified_base 16: mod_base = OTHER; note = 2-fluororibose adenine
  modified_base 17: mod_base = um
  modified_base 18: mod_base = OTHER; note = 2-fluororibose guanine
  modified_base 19: mod_base = cm
  modified_base 19..20: mod_base = OTHER; note = phosphorothioate
  modified_base 20: mod_base = um
  modified_base 20..21: mod_base = OTHER; note = phosphorothioate
  modified_base 21: mod_base = um
  source 1..21: mol_type = other RNA
tcaagaggatagtccatgctt

SEQ ID NO: 528 - RNA, 21 nt, synthetic construct
  misc_feature 1..21: note = Synthetic: WV-42202
  misc_feature 1..21: note = Synthetic: SSR-0104838
  modified_base 1: mod_base = OTHER; note = 2-fluororibose uracil
  modified_base 1..2: mod_base = OTHER; note = phosphorothioate
  modified_base 2: mod_base = OTHER; note = 2-fluororibose adenine
  modified_base 2..3: mod_base = OTHER; note = phosphorothioate
  modified_base 3: mod_base = cm
  modified_base 4: mod_base = OTHER; note = 2-fluororibose adenine
  modified_base 5: mod_base = OTHER; note = 2-O-methylribose adenine
  modified_base 6: mod_base = OTHER; note = 2-fluororibose guanine
  modified_base 7: mod_base = OTHER; note = 2-O-methylribose adenine
  modified_base 8: mod_base = OTHER; note = 2-fluororibose guanine
  modified_base 9: mod_base = gm
  modified_base 10: mod_base = OTHER; note = 2-fluororibose adenine
  modified_base 11: mod_base = um
  modified_base 12: mod_base = OTHER; note = 2-O-methylribose adenine
  modified_base 13: mod_base = gm
  modified_base 14: mod_base = OTHER; note = 2-fluororibose uracil
  modified_base 15: mod_base = cm
  modified_base 16: mod_base = OTHER; note = 2-fluororibose cytosine
  modified_base 17: mod_base = OTHER; note = 2-O-methylribose adenine
  modified_base 18: mod_base = OTHER; note = 2-fluororibose uracil
  modified_base 19: mod_base = gm
  modified_base 19..20: mod_base = OTHER; note = phosphorothioate
  modified_base 20: mod_base = um
  modified_base 20..21: mod_base = OTHER; note = phosphorothioate
  modified_base 21: mod_base = um
  source 1..21: mol_type = other RNA
tacaagaggatagtccatgtt

SEQ ID NO: 529 - RNA, 21 nt, synthetic construct
  misc_feature 1..21: note = Synthetic: WV-42203
  misc_feature 1..21: note = Synthetic: SSR-0104826
  modified_base 1: mod_base = OTHER; note = 2-fluororibose uracil
  modified_base 1..2: mod_base = OTHER; note = phosphorothioate
  modified_base 2: mod_base = OTHER; note = 2-fluororibose adenine
  modified_base 2..3: mod_base = OTHER; note = phosphorothioate
  modified_base 3: mod_base = OTHER; note = 2-O-methylribose adenine
  modified_base 4: mod_base = OTHER; note = 2-fluororibose cytosine
  modified_base 5: mod_base = OTHER; note = 2-O-methylribose adenine
  modified_base 6: mod_base = OTHER; note = 2-fluororibose adenine
  modified_base 7: mod_base = gm
  modified_base 8: mod_base = OTHER; note = 2-fluororibose adenine
  modified_base 9: mod_base = gm
  modified_base 10: mod_base = OTHER; note = 2-fluororibose guanine
  modified_base 11: mod_base = OTHER; note = 2-O-methylribose adenine
  modified_base 12: mod_base = um
  modified_base 13: mod_base = OTHER; note = 2-O-methylribose adenine
  modified_base 14: mod_base = OTHER; note = 2-fluororibose guanine
  modified_base 15: mod_base = um
  modified_base 16: mod_base = OTHER; note = 2-fluororibose cytosine
  modified_base 17: mod_base = cm
  modified_base 18: mod_base = OTHER; note = 2-fluororibose adenine
  modified_base 19: mod_base = um
  modified_base 19..20: mod_base = OTHER; note = phosphorothioate
  modified_base 20: mod_base = um
  modified_base 20..21: mod_base = OTHER; note = phosphorothioate
  modified_base 21: mod_base = um
  source 1..21: mol_type = other RNA
taacaagaggatagtccattt

SEQ ID NO: 530 - RNA, 21 nt, synthetic construct
  misc_feature 1..21: note = Synthetic: WV-42204
  misc_feature 1..21: note = Synthetic: SSR-0104823
  modified_base 1: mod_base = OTHER; note = 2-fluororibose uracil
  modified_base 1..2: mod_base = OTHER; note = phosphorothioate
  modified_base 2: mod_base = OTHER; note = 2-fluororibose adenine
  modified_base 2..3: mod_base = OTHER; note = phosphorothioate
  modified_base 3: mod_base = OTHER; note = 2-O-methylribose adenine
  modified_base 4: mod_base = OTHER; note = 2-fluororibose adenine
  modified_base 5: mod_base = cm
  modified_base 6: mod_base = OTHER; note = 2-fluororibose adenine
  modified_base 7: mod_base = OTHER; note = 2-O-methylribose adenine
  modified_base 8: mod_base = OTHER; note = 2-fluororibose guanine
  modified_base 9: mod_base = OTHER; note = 2-O-methylribose adenine
  modified_base 10: mod_base = OTHER; note = 2-fluororibose guanine
  modified_base 11: mod_base = gm
  modified_base 12: mod_base = OTHER; note = 2-O-methylribose adenine
  modified_base 13: mod_base = um
  modified_base 14: mod_base = OTHER; note = 2-fluororibose adenine
  modified_base 15: mod_base = gm
  modified_base 16: mod_base = OTHER; note = 2-fluororibose uracil
  modified_base 17: mod_base = cm
  modified_base 18: mod_base = OTHER; note = 2-fluororibose cytosine
  modified_base 19: mod_base = OTHER; note = 2-O-methylribose adenine
  modified_base 19..20: mod_base = OTHER; note = phosphorothioate
  modified_base 20: mod_base = um
  modified_base 20..21: mod_base = OTHER; note = phosphorothioate
  modified_base 21: mod_base = um
  source 1..21: mol_type = other RNA
taaacaagaggatagtccatt

SEQ ID NO: 531 - RNA, 21 nt, synthetic construct
  misc_feature 1..21: note = Synthetic: WV-42205
  misc_feature 1..21: note = Synthetic: SSR-0104822
  modified_base 1: mod_base = OTHER; note = 2-fluororibose uracil
  modified_base 1..2: mod_base = OTHER; note = phosphorothioate
  modified_base 2: mod_base = OTHER; note = 2-fluororibose adenine
  modified_base 2..3: mod_base = OTHER; note = phosphorothioate
  modified_base 3: mod_base = OTHER; note = 2-O-methylribose adenine
  modified_base 4: mod_base = OTHER; note = 2-fluororibose adenine
  modified_base 5: mod_base = OTHER; note = 2-O-methylribose adenine
  modified_base 6: mod_base = OTHER; note = 2-fluororibose adenine
  modified_base 7: mod_base = cm
  modified_base 8: mod_base = OTHER; note = 2-fluororibose adenine
  modified_base 9: mod_base = OTHER; note = 2-O-methylribose adenine
  modified_base 10: mod_base = OTHER; note = 2-fluororibose guanine
  modified_base 11: mod_base = OTHER; note = 2-O-methylribose adenine
  modified_base 12: mod_base = gm
  modified_base 13: mod_base = gm
  modified_base 14: mod_base = OTHER; note = 2-fluororibose adenine
  modified_base 15: mod_base = um
  modified_base 16: mod_base = OTHER; note = 2-fluororibose adenine
  modified_base 17: mod_base = gm
  modified_base 18: mod_base = OTHER; note = 2-fluororibose uracil
  modified_base 19: mod_base = cm
  modified_base 19..20: mod_base = OTHER; note = phosphorothioate
  modified_base 20: mod_base = um
  modified_base 20..21: mod_base = OTHER; note = phosphorothioate
  modified_base 21: mod_base = um
  source 1..21: mol_type = other RNA
taaaaacaagaggatagtctt

SEQ ID NO: 532 - RNA, 21 nt, synthetic construct
  misc_feature 1..21: note = Synthetic: WV-42206
  misc_feature 1..21: note = Synthetic: SSR-0104832
  modified_base 1: mod_base = OTHER; note = 2-fluororibose uracil
  modified_base 1..2: mod_base = OTHER; note = phosphorothioate
  modified_base 2: mod_base = OTHER; note = 2-fluororibose adenine
  modified_base 2..3: mod_base = OTHER; note = phosphorothioate
  modified_base 3: mod_base = OTHER; note = 2-O-methylribose adenine
  modified_base 4: mod_base = OTHER; note = 2-fluororibose uracil
  modified_base 5: mod_base = OTHER; note = 2-O-methylribose adenine
  modified_base 6: mod_base = OTHER; note = 2-fluororibose adenine
  modified_base 7: mod_base = OTHER; note = 2-O-methylribose adenine
  modified_base 8: mod_base = OTHER; note = 2-fluororibose adenine
  modified_base 9: mod_base = OTHER; note = 2-O-methylribose adenine
  modified_base 10: mod_base = OTHER; note = 2-fluororibose cytosine
  modified_base 11: mod_base = OTHER; note = 2-O-methylribose adenine
  modified_base 12: mod_base = OTHER; note = 2-O-methylribose adenine
  modified_base 13: mod_base = gm
  modified_base 14: mod_base = OTHER; note = 2-fluororibose adenine
  modified_base 15: mod_base = gm
  modified_base 16: mod_base = OTHER; note = 2-fluororibose guanine
  modified_base 17: mod_base = OTHER; note = 2-O-methylribose adenine
  modified_base 18: mod_base = OTHER; note = 2-fluororibose uracil
  modified_base 19: mod_base = OTHER; note = 2-O-methylribose adenine
  modified_base 19..20: mod_base = OTHER; note = phosphorothioate
  modified_base 20: mod_base = um
  modified_base 20..21: mod_base = OTHER; note = phosphorothioate
  modified_base 21: mod_base = um
  source 1..21: mol_type = other RNA
taataaaaacaagaggatatt

SEQ ID NO: 533 - RNA, 21 nt, synthetic construct
  misc_feature 1..21: note = Synthetic: WV-42207
  misc_feature 1..21: note = Synthetic: SSR-0104886
  modified_base 1: mod_base = OTHER; note = 2-fluororibose uracil
  modified_base 1..2: mod_base = OTHER; note = phosphorothioate
  modified_base 2: mod_base = OTHER; note = 2-fluororibose uracil
  modified_base 2..3: mod_base = OTHER; note = phosphorothioate
  modified_base 3: mod_base = OTHER; note = 2-O-methylribose adenine
  modified_base 4: mod_base = OTHER; note = 2-fluororibose adenine
  modified_base 5: mod_base = um
  modified_base 6: mod_base = OTHER; note = 2-fluororibose adenine
  modified_base 7: mod_base = OTHER; note = 2-O-methylribose adenine
  modified_base 8: mod_base = OTHER; note = 2-fluororibose adenine
  modified_base 9: mod_base = OTHER; note = 2-O-methylribose adenine
  modified_base 10: mod_base = OTHER; note = 2-fluororibose adenine
  modified_base 11: mod_base = cm
  modified_base 12: mod_base = OTHER; note = 2-O-methylribose adenine
  modified_base 13: mod_base = OTHER; note = 2-O-methylribose adenine
  modified_base 14: mod_base = OTHER; note = 2-fluororibose guanine
  modified_base 15: mod_base = OTHER; note = 2-O-methylribose adenine
  modified_base 16: mod_base = OTHER; note = 2-fluororibose guanine
  modified_base 17: mod_base = gm
  modified_base 18: mod_base = OTHER; note = 2-fluororibose adenine
  modified_base 19: mod_base = um
  modified_base 19..20: mod_base = OTHER; note = phosphorothioate
  modified_base 20: mod_base = um
  modified_base 20..21: mod_base = OTHER; note = phosphorothioate
  modified_base 21: mod_base = um
  source 1..21: mol_type = other RNA
ttaataaaaacaagaggattt

SEQ ID NO: 534 - RNA, 21 nt, synthetic construct
  misc_feature 1..21: note = Synthetic: WV-42208
  misc_feature 1..21: note = Synthetic: SSR-0104905
  modified_base 1: mod_base = OTHER; note = 2-fluororibose uracil
  modified_base 1..2: mod_base = OTHER; note = phosphorothioate
  modified_base 2: mod_base = OTHER; note = 2-fluororibose uracil
  modified_base 2..3: mod_base = OTHER; note = phosphorothioate
  modified_base 3: mod_base = um
  modified_base 4: mod_base = OTHER; note = 2-fluororibose adenine
  modified_base 5: mod_base = OTHER; note = 2-O-methylribose adenine
  modified_base 6: mod_base = OTHER; note = 2-fluororibose uracil
  modified_base 7: mod_base = OTHER; note = 2-O-methylribose adenine
  modified_base 8: mod_base = OTHER; note = 2-fluororibose adenine
  modified_base 9: mod_base = OTHER; note = 2-O-methylribose adenine
  modified_base 10: mod_base = OTHER; note = 2-fluororibose adenine
  modified_base 11: mod_base = OTHER; note = 2-O-methylribose adenine
  modified_base 12: mod_base = cm
  modified_base 13: mod_base = OTHER; note = 2-O-methylribose adenine
  modified_base 14: mod_base = OTHER; note = 2-fluororibose adenine
  modified_base 15: mod_base = gm
  modified_base 16: mod_base = OTHER; note = 2-fluororibose adenine
  modified_base 17: mod_base = gm
  modified_base 18: mod_base = OTHER; note = 2-fluororibose guanine
  modified_base 19: mod_base = OTHER; note = 2-O-methylribose adenine
  modified_base 19..20: mod_base = OTHER; note = phosphorothioate
  modified_base 20: mod_base = um
  modified_base 20..21: mod_base = OTHER; note = phosphorothioate
  modified_base 21: mod_base = um
  source 1..21: mol_type = other RNA
tttaataaaaacaagaggatt

SEQ ID NO: 535 - RNA, 21 nt, synthetic construct
  misc_feature 1..21: note = Synthetic: WV-42209
  misc_feature 1..21: note = Synthetic: SSR-0104865
  modified_base 1: mod_base = OTHER; note = 2-fluororibose uracil
  modified_base 1..2: mod_base = OTHER; note = phosphorothioate
  modified_base 2: mod_base = OTHER; note = 2-fluororibose cytosine
  modified_base 2..3: mod_base = OTHER; note = phosphorothioate
  modified_base 3: mod_base = OTHER; note = 2-O-methylribose adenine
  modified_base 4: mod_base = OTHER; note = 2-fluororibose uracil
  modified_base 5: mod_base = um
  modified_base 6: mod_base = OTHER; note = 2-fluororibose uracil
  modified_base 7: mod_base = gm
  modified_base 8: mod_base = OTHER; note = 2-fluororibose uracil
  modified_base 9: mod_base = um
  modified_base 10: mod_base = OTHER; note = 2-fluororibose uracil
  modified_base 11: mod_base = um
  modified_base 12: mod_base = um
  modified_base 13: mod_base = OTHER; note = 2-O-methylribose adenine
  modified_base 14: mod_base = OTHER; note = 2-fluororibose adenine
  modified_base 15: mod_base = um
  modified_base 16: mod_base = OTHER; note = 2-fluororibose adenine
  modified_base 17: mod_base = OTHER; note = 2-O-methylribose adenine
  modified_base 18: mod_base = OTHER; note = 2-fluororibose adenine
  modified_base 19: mod_base = OTHER; note = 2-O-methylribose adenine
  modified_base 19..20: mod_base = OTHER; note = phosphorothioate
  modified_base 20: mod_base = um
  modified_base 20..21: mod_base = OTHER; note = phosphorothioate
  modified_base 21: mod_base = um
  source 1..21: mol_type = other RNA
tcatttgtttttaataaaatt

SEQ ID NO: 536 - RNA, 21 nt, synthetic construct
  misc_feature 1..21: note = Synthetic: WV-42210
  misc_feature 1..21: note = Synthetic: SSR-0104836
  modified_base 1: mod_base = OTHER; note = 2-fluororibose uracil
  modified_base 1..2: mod_base = OTHER; note = phosphorothioate
  modified_base 2: mod_base = OTHER; note = 2-fluororibose adenine
  modified_base 2..3: mod_base = OTHER; note = phosphorothioate
  modified_base 3: mod_base = OTHER; note = 2-O-methylribose adenine
  modified_base 4: mod_base = OTHER; note = 2-fluororibose uracil
  modified_base 5: mod_base = cm
  modified_base 6: mod_base = OTHER; note = 2-fluororibose adenine
  modified_base 7: mod_base = um
  modified_base 8: mod_base = OTHER; note = 2-fluororibose uracil
  modified_base 9: mod_base = um
  modified_base 10: mod_base = OTHER; note = 2-fluororibose guanine
  modified_base 11: mod_base = um
  modified_base 12: mod_base = um
  modified_base 13: mod_base = um
  modified_base 14: mod_base = OTHER; note = 2-fluororibose uracil
  modified_base 15: mod_base = um
  modified_base 16: mod_base = OTHER; note = 2-fluororibose adenine
  modified_base 17: mod_base = OTHER; note = 2-O-methylribose adenine
  modified_base 18: mod_base = OTHER; note = 2-fluororibose uracil
  modified_base 19: mod_base = OTHER; note = 2-O-methylribose adenine
  modified_base 19..20: mod_base = OTHER; note = phosphorothioate
  modified_base 20: mod_base = um
  modified_base 20..21: mod_base = OTHER; note = phosphorothioate
  modified_base 21: mod_base = um
  source 1..21: mol_type = other RNA
taatcatttgtttttaatatt

SEQ ID NO: 537 - RNA, 21 nt, synthetic construct
  misc_feature 1..21: note = Synthetic: WV-42211
  misc_feature 1..21: note = Synthetic: SSR-0104825
  modified_base 1: mod_base = OTHER; note = 2-fluororibose uracil
  modified_base 1..2: mod_base = OTHER; note = phosphorothioate
  modified_base 2: mod_base = OTHER; note = 2-fluororibose adenine
  modified_base 2..3: mod_base = OTHER; note = phosphorothioate
  modified_base 3: mod_base = OTHER; note = 2-O-methylribose adenine
  modified_base 4: mod_base = OTHER; note = 2-fluororibose adenine
  modified_base 5: mod_base = um
  modified_base 6: mod_base = OTHER; note = 2-fluororibose cytosine
  modified_base 7: mod_base = OTHER; note = 2-O-methylribose adenine
  modified_base 8: mod_base = OTHER; note = 2-fluororibose uracil
  modified_base 9: mod_base = um
  modified_base 10: mod_base = OTHER; note = 2-fluororibose uracil
  modified_base 11: mod_base = gm
  modified_base 12: mod_base = um
  modified_base 13: mod_base = um
  modified_base 14: mod_base = OTHER; note = 2-fluororibose uracil
  modified_base 15: mod_base = um
  modified_base 16: mod_base = OTHER; note = 2-fluororibose uracil
  modified_base 17: mod_base = OTHER; note = 2-O-methylribose adenine
  modified_base 18: mod_base = OTHER; note = 2-fluororibose adenine
  modified_base 19: mod_base = um
  modified_base 19..20: mod_base = OTHER; note = phosphorothioate
  modified_base 20: mod_base = um
  modified_base 20..21: mod_base = OTHER; note = phosphorothioate
  modified_base 21: mod_base = um
  source 1..21: mol_type = other RNA
taaatcatttgtttttaattt

SEQ ID NO: 538 - RNA, 21 nt, synthetic construct
  misc_feature 1..21: note = Synthetic: WV-42212
  misc_feature 1..21: note = Synthetic: SSR-0104843
  modified_base 1: mod_base = OTHER; note = 2-fluororibose uracil
  modified_base 1..2: mod_base = OTHER; note = phosphorothioate
  modified_base 2: mod_base = OTHER; note = 2-fluororibose adenine
  modified_base 2..3: mod_base = OTHER; note = phosphorothioate
  modified_base 3: mod_base = cm
  modified_base 4: mod_base = OTHER; note = 2-fluororibose uracil
  modified_base 5: mod_base = OTHER; note = 2-O-methylribose adenine
  modified_base 6: mod_base = OTHER; note = 2-fluororibose cytosine
  modified_base 7: mod_base = OTHER; note = 2-O-methylribose adenine
  modified_base 8: mod_base = OTHER; note = 2-fluororibose adenine
  modified_base 9: mod_base = gm
  modified_base 10: mod_base = OTHER; note = 2-fluororibose adenine
  modified_base 11: mod_base = gm
  modified_base 12: mod_base = gm
  modified_base 13: mod_base = um
  modified_base 14: mod_base = OTHER; note = 2-fluororibose uracil
  modified_base 15: mod_base = OTHER; note = 2-O-methylribose adenine
  modified_base 16: mod_base = OTHER; note = 2-fluororibose uracil
  modified_base 17: mod_base = um
  modified_base 18: mod_base = OTHER; note = 2-fluororibose uracil
  modified_base 19: mod_base = um
  modified_base 19..20: mod_base = OTHER; note = phosphorothioate
  modified_base 20: mod_base = um
  modified_base 20..21: mod_base = OTHER; note = phosphorothioate
  modified_base 21: mod_base = um
  source 1..21: mol_type = other RNA
tactacaagaggttatttttt

SEQ ID NO: 539 - RNA, 21 nt, synthetic construct
  misc_feature 1..21: note = Synthetic: WV-42213
  misc_feature 1..21: note = Synthetic: SSR-0104827
  modified_base 1: mod_base = OTHER; note = 2-fluororibose uracil
  modified_base 1..2: mod_base = OTHER; note = phosphorothioate
  modified_base 2: mod_base = OTHER; note = 2-fluororibose adenine
  modified_base 2..3: mod_base = OTHER; note = phosphorothioate
  modified_base 3: mod_base = OTHER; note = 2-O-methylribose adenine
  modified_base 4: mod_base = OTHER; note = 2-fluororibose cytosine
  modified_base 5: mod_base = um
  modified_base 6: mod_base = OTHER; note = 2-fluororibose adenine
  modified_base 7: mod_base = cm
  modified_base 8: mod_base = OTHER; note = 2-fluororibose adenine
  modified_base 9: mod_base = OTHER; note = 2-O-methylribose adenine
  modified_base 10: mod_base = OTHER; note = 2-fluororibose guanine
  modified_base 11: mod_base = OTHER; note = 2-O-methylribose adenine
  modified_base 12: mod_base = gm
  modified_base 13: mod_base = gm
  modified_base 14: mod_base = OTHER; note = 2-fluororibose uracil
  modified_base 15: mod_base = um
  modified_base 16: mod_base = OTHER; note = 2-fluororibose adenine
  modified_base 17: mod_base = um
  modified_base 18: mod_base = OTHER; note = 2-fluororibose uracil
  modified_base 19: mod_base = um
  modified_base 19..20: mod_base = OTHER; note = phosphorothioate
  modified_base 20: mod_base = um
  modified_base 20..21: mod_base = OTHER; note = phosphorothioate
  modified_base 21: mod_base = um
  source 1..21: mol_type = other RNA
taactacaagaggttattttt

SEQ ID NO: 540 - RNA, 21 nt, synthetic construct
  misc_feature 1..21: note = Synthetic: WV-42214
  misc_feature 1..21: note = Synthetic: SSR-0104885
  modified_base 1: mod_base = OTHER; note = 2-fluororibose uracil
  modified_base 1..2: mod_base = OTHER; note = phosphorothioate
  modified_base 2: mod_base = OTHER; note = 2-fluororibose uracil
  modified_base 2..3: mod_base = OTHER; note = phosphorothioate
  modified_base 3: mod_base = OTHER; note = 2-O-methylribose adenine
  modified_base 4: mod_base = OTHER; note = 2-fluororibose adenine
  modified_base 5: mod_base = cm
  modified_base 6: mod_base = OTHER; note = 2-fluororibose uracil
  modified_base 7: mod_base = OTHER; note = 2-O-methylribose adenine
  modified_base 8: mod_base = OTHER; note = 2-fluororibose cytosine
  modified_base 9: mod_base = OTHER; note = 2-O-methylribose adenine
  modified_base 10: mod_base = OTHER; note = 2-fluororibose adenine
  modified_base 11: mod_base = gm
  modified_base 12: mod_base = OTHER; note = 2-O-methylribose adenine
  modified_base 13: mod_base = gm
  modified_base 14: mod_base = OTHER; note = 2-fluororibose guanine
  modified_base 15: mod_base = um
  modified_base 16: mod_base = OTHER; note = 2-fluororibose uracil
  modified_base 17: mod_base = OTHER; note = 2-O-methylribose adenine
  modified_base 18: mod_base = OTHER; note = 2-fluororibose uracil
  modified_base 19: mod_base = um
  modified_base 19..20: mod_base = OTHER; note = phosphorothioate
  modified_base 20: mod_base = um
  modified_base 20..21: mod_base = OTHER; note = phosphorothioate
  modified_base 21: mod_base = um
  source 1..21: mol_type = other RNA
ttaactacaagaggttatttt

SEQ ID NO: 541 - RNA, 21 nt, synthetic construct
  misc_feature 1..21: note = Synthetic: WV-42215
  misc_feature 1..21: note = Synthetic: SSR-0104851
  modified_base 1: mod_base = OTHER; note = 2-fluororibose uracil
  modified_base 1..2: mod_base = OTHER; note = phosphorothioate
  modified_base 2: mod_base = OTHER; note = 2-fluororibose adenine
  modified_base 2..3: mod_base = OTHER; note = phosphorothioate
  modified_base 3: mod_base = um
  modified_base 4: mod_base = OTHER; note = 2-fluororibose adenine
  modified_base 5: mod_base = OTHER; note = 2-O-methylribose adenine
  modified_base 6: mod_base = OTHER; note = 2-fluororibose cytosine
  modified_base 7: mod_base = um
  modified_base 8: mod_base = OTHER; note = 2-fluororibose adenine
  modified_base 9: mod_base = cm
  modified_base 10: mod_base = OTHER; note = 2-fluororibose adenine
  modified_base 11: mod_base = OTHER; note = 2-O-methylribose adenine
  modified_base 12: mod_base = gm
  modified_base 13: mod_base = OTHER; note = 2-O-methylribose adenine
  modified_base 14: mod_base = OTHER; note = 2-fluororibose guanine
  modified_base 15: mod_base = gm
  modified_base 16: mod_base = OTHER; note = 2-fluororibose uracil
  modified_base 17: mod_base = um
  modified_base 18: mod_base = OTHER; note = 2-fluororibose adenine
  modified_base 19: mod_base = um
  modified_base 19..20: mod_base = OTHER; note = phosphorothioate
  modified_base 20: mod_base = um
  modified_base 20..21: mod_base = OTHER; note = phosphorothioate
  modified_base 21: mod_base = um
  source 1..21: mol_type = other RNA
tataactacaagaggttattt

SEQ ID NO: 542 - RNA, 21 nt, synthetic construct
  misc_feature 1..21: note = Synthetic: WV-42216
  misc_feature 1..21: note = Synthetic: SSR-0104890
  modified_base 1: mod_base = OTHER; note = 2-fluororibose uracil
  modified_base 1..2: mod_base = OTHER; note = phosphorothioate
  modified_base 2: mod_base = OTHER; note = 2-fluororibose uracil
  modified_base 2..3: mod_base = OTHER; note = phosphorothioate
  modified_base 3: mod_base = OTHER; note = 2-O-methylribose adenine
  modified_base 4: mod_base = OTHER; note = 2-fluororibose uracil
  modified_base 5: mod_base = OTHER; note = 2-O-methylribose adenine
  modified_base 6: mod_base = OTHER; note = 2-fluororibose adenine
  modified_base 7: mod_base = cm
  modified_base 8: mod_base = OTHER; note = 2-fluororibose uracil
  modified_base 9: mod_base = OTHER; note = 2-O-methylribose adenine
  modified_base 10: mod_base = OTHER; note = 2-fluororibose cytosine
  modified_base 11: mod_base = OTHER; note = 2-O-methylribose adenine
  modified_base 12: mod_base = OTHER; note = 2-O-methylribose adenine
  modified_base 13: mod_base = gm
  modified_base 14: mod_base = OTHER; note = 2-fluororibose adenine
  modified_base 15: mod_base = gm
  modified_base 16: mod_base = OTHER; note = 2-fluororibose guanine
  modified_base 17: mod_base = um
  modified_base 18: mod_base = OTHER; note = 2-fluororibose uracil
  modified_base 19: mod_base = OTHER; note = 2-O-methylribose adenine
  modified_base 19..20: mod_base = OTHER; note = phosphorothioate
  modified_base 20: mod_base = um
  modified_base 20..21: mod_base = OTHER; note = phosphorothioate
  modified_base 21: mod_base = um
  source 1..21: mol_type = other RNA
ttataactacaagaggttatt

SEQ ID NO: 543 - RNA, 21 nt, synthetic construct
  misc_feature 1..21: note = Synthetic: WV-42217
  misc_feature 1..21: note = Synthetic: SSR-0104907
  modified_base 1: mod_base = OTHER; note = 2-fluororibose uracil
  modified_base 1..2: mod_base = OTHER; note = phosphorothioate
  modified_base 2: mod_base = OTHER; note = 2-fluororibose uracil
  modified_base 2..3: mod_base = OTHER; note = phosphorothioate
  modified_base 3: mod_base = um
  modified_base 4: mod_base = OTHER; note = 2-fluororibose adenine
  modified_base 5: mod_base = um
  modified_base 6: mod_base = OTHER; note = 2-fluororibose adenine
  modified_base 7: mod_base = OTHER; note = 2-O-methylribose adenine
  modified_base 8: mod_base = OTHER; note = 2-fluororibose cytosine
  modified_base 9: mod_base = um
  modified_base 10: mod_base = OTHER; note = 2-fluororibose adenine
  modified_base 11: mod_base = cm
  modified_base 12: mod_base = OTHER; note = 2-O-methylribose adenine
  modified_base 13: mod_base = OTHER; note = 2-O-methylribose adenine
  modified_base 14: mod_base = OTHER; note = 2-fluororibose guanine
  modified_base 15: mod_base = OTHER; note = 2-O-methylribose adenine
  modified_base 16: mod_base = OTHER; note = 2-fluororibose guanine
  modified_base 17: mod_base = gm
  modified_base 18: mod_base = OTHER; note = 2-fluororibose uracil
  modified_base 19: mod_base = um
  modified_base 19..20: mod_base = OTHER; note = phosphorothioate
  modified_base 20: mod_base = um
  modified_base 20..21: mod_base = OTHER; note = phosphorothioate
  modified_base 21: mod_base = um
  source 1..21: mol_type = other RNA
tttataactacaagaggtttt

SEQ ID NO: 544 - RNA, 21 nt, synthetic construct
  misc_feature 1..21: note = Synthetic: WV-42218
  misc_feature 1..21: note = Synthetic: SSR-0104842
  modified_base 1: mod_base = OTHER; note = 2-fluororibose uracil
  modified_base 1..2: mod_base = OTHER; note = phosphorothioate
  modified_base 2: mod_base = OTHER; note = 2-fluororibose adenine
  modified_base 2..3: mod_base = OTHER; note = phosphorothioate
  modified_base 3: mod_base = cm
  modified_base 4: mod_base = OTHER; note = 2-fluororibose guanine
  modified_base 5: mod_base = um
  modified_base 6: mod_base = OTHER; note = 2-fluororibose uracil
  modified_base 7: mod_base = um
  modified_base 8: mod_base = OTHER; note = 2-fluororibose uracil
  modified_base 9: mod_base = OTHER; note = 2-O-methylribose adenine
  modified_base 10: mod_base = OTHER; note = 2-fluororibose uracil
  modified_base 11: mod_base = um
  modified_base 12: mod_base = um
  modified_base 13: mod_base = um
  modified_base 14: mod_base = OTHER; note = 2-fluororibose adenine
  modified_base 15: mod_base = um
  modified_base 16: mod_base = OTHER; note = 2-fluororibose adenine
  modified_base 17: mod_base = OTHER; note = 2-O-methylribose adenine
  modified_base 18: mod_base = OTHER; note = 2-fluororibose cytosine
  modified_base 19: mod_base = um
  modified_base 19..20: mod_base = OTHER; note = phosphorothioate
  modified_base 20: mod_base = um
  modified_base 20..21: mod_base = OTHER; note = phosphorothioate
  modified_base 21: mod_base = um
  source 1..21: mol_type = other RNA
tacgttttattttataacttt

SEQ ID NO: 545 - RNA, 19 nt, synthetic construct
  misc_feature 1..19: note = Synthetic: WV-42219
  misc_feature 1..19: note = Synthetic: SSR-0104941
  modified_base 1: mod_base = OTHER; note = 2-O-methylribose adenine
  modified_base 2: mod_base = um
  modified_base 3: mod_base = OTHER; note = 2-fluororibose guanine
  modified_base 4: mod_base = um
  modified_base 5: mod_base = OTHER; note = 2-fluororibose guanine
  modified_base 6: mod_base = gm
  modified_base 7: mod_base = OTHER; note = 2-fluororibose uracil
  modified_base 8: mod_base = OTHER; note = 2-fluororibose adenine
  modified_base 9: mod_base = OTHER; note = 2-fluororibose guanine
  modified_base 10: mod_base = OTHER; note = 2-O-methylribose adenine
  modified_base 11: mod_base = OTHER; note = 2-fluororibose cytosine
  modified_base 12: mod_base = um
  modified_base 13: mod_base = OTHER; note = 2-fluororibose guanine
  modified_base 14: mod_base = cm
  modified_base 15: mod_base = OTHER; note = 2-fluororibose adenine
  modified_base 16: mod_base = gm
  modified_base 17: mod_base = OTHER; note = 2-fluororibose cytosine
  modified_base 18: mod_base = OTHER; note = 2-O-methylribose adenine
  modified_base 19: mod_base = OTHER; note = 2-fluororibose adenine
  source 1..19: mol_type = other RNA
atgtggtagactgcagcaa

SEQ ID NO: 546 - RNA, 19 nt, synthetic construct
  misc_feature 1..19: note = Synthetic: WV-42220
  misc_feature 1..19: note = Synthetic: SSR-0104969
  modified_base 1: mod_base = gm
  modified_base 2: mod_base = um
  modified_base 3: mod_base = OTHER; note = 2-fluororibose guanine
  modified_base 4: mod_base = gm
  modified_base 5: mod_base = OTHER; note = 2-fluororibose uracil
  modified_base 6: mod_base = OTHER; note = 2-O-methylribose adenine
  modified_base 7: mod_base = OTHER; note = 2-fluororibose guanine
  modified_base 8: mod_base = OTHER; note = 2-fluororibose adenine
  modified_base 9: mod_base = OTHER; note = 2-fluororibose cytosine
  modified_base 10: mod_base = um
  modified_base 11: mod_base = OTHER; note = 2-fluororibose guanine
  modified_base 12: mod_base = cm
  modified_base 13: mod_base = OTHER; note = 2-fluororibose adenine
  modified_base 14: mod_base = gm
  modified_base 15: mod_base = OTHER; note = 2-fluororibose cytosine
  modified_base 16: mod_base = OTHER; note = 2-O-methylribose adenine
  modified_base 17: mod_base = OTHER; note = 2-fluororibose adenine
  modified_base 18: mod_base = cm
  modified_base 19: mod_base = OTHER; note = 2-fluororibose adenine
  source 1..19: mol_type = other RNA
gtggtagactgcagcaaca

SEQ ID NO: 547 - RNA, 19 nt, synthetic construct
  misc_feature 1..19: note = Synthetic: WV-42221
  misc_feature 1..19: note = Synthetic: SSR-0105166
  modified_base 1: mod_base = um
  modified_base 2: mod_base = gm
  modified_base 3: mod_base = OTHER; note = 2-fluororibose guanine
  modified_base 4: mod_base = um
  modified_base 5: mod_base = OTHER; note = 2-fluororibose adenine
  modified_base 6: mod_base = gm
  modified_base 7: mod_base = OTHER; note = 2-fluororibose adenine
  modified_base 8: mod_base = OTHER; note = 2-fluororibose cytosine
  modified_base 9: mod_base = OTHER; note = 2-fluororibose uracil
  modified_base 10: mod_base = gm
  modified_base 11: mod_base = OTHER; note = 2-fluororibose cytosine
  modified_base 12: mod_base = OTHER; note = 2-O-methylribose adenine
  modified_base 13: mod_base = OTHER; note = 2-fluororibose guanine
  modified_base 14: mod_base = cm
  modified_base 15: mod_base = OTHER; note = 2-fluororibose adenine
  modified_base 16: mod_base = OTHER; note = 2-O-methylribose adenine
  modified_base 17: mod_base = OTHER; note = 2-fluororibose cytosine
  modified_base 18: mod_base = OTHER; note = 2-O-methylribose adenine
  modified_base 19: mod_base = OTHER; note = 2-fluororibose adenine
  source 1..19: mol_type = other RNA
tggtagactgcagcaacaa

SEQ ID NO: 548 - RNA, 19 nt, synthetic construct
  misc_feature 1..19: note = Synthetic: WV-42222
  misc_feature 1..19: note = Synthetic: SSR-0104967
  modified_base 1: mod_base = gm
  modified_base 2: mod_base = gm
  modified_base 3: mod_base = OTHER; note = 2-fluororibose uracil
  modified_base 4: mod_base = OTHER; note = 2-O-methylribose adenine
  modified_base 5: mod_base = OTHER; note = 2-fluororibose guanine
  modified_base 6: mod_base = OTHER; note = 2-O-methylribose adenine
  modified_base 7: mod_base = OTHER; note = 2-fluororibose cytosine
  modified_base 8: mod_base = OTHER; note = 2-fluororibose uracil
  modified_base 9: mod_base = OTHER; note = 2-fluororibose guanine
  modified_base 10: mod_base = cm
  modified_base 11: mod_base = OTHER; note = 2-fluororibose adenine
  modified_base 12: mod_base = gm
  modified_base 13: mod_base = OTHER; note = 2-fluororibose cytosine
  modified_base 14: mod_base = OTHER; note = 2-O-methylribose adenine
  modified_base 15: mod_base = OTHER; note = 2-fluororibose adenine
  modified_base 16: mod_base = cm
  modified_base 17: mod_base = OTHER; note = 2-fluororibose adenine
  modified_base 18: mod_base = gm
  modified_base 19: mod_base = OTHER; note = 2-fluororibose adenine
  source 1..19: mol_type = other RNA
ggtagactgcagcaacaga

SEQ ID NO: 549 - RNA, 19 nt, synthetic construct
  misc_feature 1..19: note = Synthetic: WV-42223
  misc_feature 1..19: note = Synthetic: SSR-0104968
  modified_base 1: mod_base = gm
  modified_base 2: mod_base = um
  modified_base 3: mod_base = OTHER; note = 2-fluororibose adenine
  modified_base 4: mod_base = gm
  modified_base 5: mod_base = OTHER; note = 2-fluororibose adenine
  modified_base 6: mod_base = cm
  modified_base 7: mod_base = OTHER; note = 2-fluororibose uracil
  modified_base 8: mod_base = OTHER; note = 2-fluororibose guanine
  modified_base 9: mod_base = OTHER; note = 2-fluororibose cytosine
  modified_base 10: mod_base = OTHER; note = 2-O-methylribose adenine
  modified_base 11: mod_base = OTHER; note = 2-fluororibose guanine
  modified_base 12: mod_base = cm
  modified_base 13: mod_base = OTHER; note = 2-fluororibose adenine
  modified_base 14: mod_base = OTHER; note = 2-O-methylribose adenine
  modified_base 15: mod_base = OTHER; note = 2-fluororibose cytosine
  modified_base 16: mod_base = OTHER; note = 2-O-methylribose adenine
  modified_base 17: mod_base = OTHER; note = 2-fluororibose guanine
  modified_base 18: mod_base = OTHER; note = 2-O-methylribose adenine
  modified_base 19: mod_base = OTHER; note = 2-fluororibose adenine
  source 1..19: mol_type = other RNA
gtagactgcagcaacagaa

SEQ ID NO: 550 - RNA, 19 nt, synthetic construct
  misc_feature 1..19: note = Synthetic: WV-42224
  misc_feature 1..19: note = Synthetic: SSR-0105150
  modified_base 1: mod_base = um
  modified_base 2: mod_base = OTHER; note = 2-O-methylribose adenine
  modified_base 3: mod_base = OTHER; note = 2-fluororibose guanine
  modified_base 4: mod_base = OTHER; note = 2-O-methylribose adenine
  modified_base 5: mod_base = OTHER; note = 2-fluororibose cytosine
  modified_base 6: mod_base = um
  modified_base 7: mod_base = OTHER; note = 2-fluororibose guanine
  modified_base 8: mod_base = OTHER; note = 2-fluororibose cytosine
  modified_base 9: mod_base = OTHER; note = 2-fluororibose adenine
  modified_base 10: mod_base = gm
  modified_base 11: mod_base = OTHER; note = 2-fluororibose cytosine
  modified_base 12: mod_base = OTHER; note = 2-O-methylribose adenine
  modified_base 13: mod_base = OTHER; note = 2-fluororibose adenine
  modified_base 14: mod_base = cm
  modified_base 15: mod_base = OTHER; note = 2-fluororibose adenine
  modified_base 16: mod_base = gm
  modified_base 17: mod_base = OTHER; note = 2-fluororibose adenine
  modified_base 18: mod_base = gm
  modified_base 19: mod_base = OTHER; note = 2-fluororibose adenine
  source 1..19: mol_type = other RNA
tagactgcagcaacagaga

SEQ ID NO: 551 - RNA, 19 nt, synthetic construct
  misc_feature 1..19: note = Synthetic: WV-42225
  misc_feature 1..19: note = Synthetic: SSR-0104932
  modified_base 1: mod_base = OTHER; note = 2-O-methylribose adenine
  modified_base 2: mod_base = gm
  modified_base 3: mod_base = OTHER; note = 2-fluororibose adenine
  modified_base 4: mod_base = cm
  modified_base 5: mod_base = OTHER; note = 2-fluororibose uracil
  modified_base 6: mod_base = gm
  modified_base 7: mod_base = OTHER; note = 2-fluororibose cytosine
  modified_base 8: mod_base = OTHER; note = 2-fluororibose adenine
  modified_base 9: mod_base = OTHER; note = 2-fluororibose guanine
  modified_base 10: mod_base = cm
  modified_base 11: mod_base = OTHER; note = 2-fluororibose adenine
  modified_base 12: mod_base = OTHER; note = 2-O-methylribose adenine
  modified_base 13: mod_base = OTHER; note = 2-fluororibose cytosine
  modified_base 14: mod_base = OTHER; note = 2-O-methylribose adenine
  modified_base 15: mod_base = OTHER; note = 2-fluororibose guanine
  modified_base 16: mod_base = OTHER; note = 2-O-methylribose adenine
  modified_base 17: mod_base = OTHER; note = 2-fluororibose guanine
  modified_base 18: mod_base = OTHER; note = 2-O-methylribose adenine
  modified_base 19: mod_base = OTHER; note = 2-fluororibose adenine
  source 1..19: mol_type = other RNA
agactgcagcaacagagaa

SEQ ID NO: 552 - RNA, 19 nt, synthetic construct
  misc_feature 1..19: note = Synthetic: WV-42226
  misc_feature 1..19: note = Synthetic: SSR-0104964
  modified_base 1: mod_base = gm
  modified_base 2: mod_base = OTHER; note = 2-O-methylribose adenine
  modified_base 3: mod_base = OTHER; note = 2-fluororibose cytosine
  modified_base 4: mod_base = um
  modified_base 5: mod_base = OTHER; note = 2-fluororibose guanine
  modified_base 6: mod_base = cm
  modified_base 7: mod_base = OTHER; note = 2-fluororibose adenine
  modified_base 8: mod_base = OTHER; note = 2-fluororibose guanine
  modified_base 9: mod_base = OTHER; note = 2-fluororibose cytosine
  modified_base 10: mod_base = OTHER; note = 2-O-methylribose adenine
  modified_base 11: mod_base = OTHER; note = 2-fluororibose adenine
  modified_base 12: mod_base = cm
  modified_base 13: mod_base = OTHER; note = 2-fluororibose adenine
  modified_base 14: mod_base = gm
  modified_base 15: mod_base = OTHER; note = 2-fluororibose adenine
  modified_base 16: mod_base = gm
  modified_base 17: mod_base = OTHER; note = 2-fluororibose adenine
  modified_base 18: mod_base = OTHER; note = 2-O-methylribose adenine
  modified_base 19: mod_base = OTHER; note = 2-fluororibose adenine
  source 1..19: mol_type = other RNA
gactgcagcaacagagaaa

SEQ ID NO: 553 - RNA, 19 nt, synthetic construct
  misc_feature 1..19: note = Synthetic: WV-42227
  misc_feature 1..19: note = Synthetic: SSR-0104949
  modified_base 1: mod_base = cm
  modified_base 2: mod_base = OTHER; note = 2-O-methylribose adenine
  modified_base 3: mod_base = OTHER; note = 2-fluororibose uracil
  modified_base 4: mod_base = cm
  modified_base 5: mod_base = OTHER; note = 2-fluororibose cytosine
  modified_base 6: mod_base = um
  modified_base 7: mod_base = OTHER; note = 2-fluororibose adenine
  modified_base 8: mod_base = OTHER; note = 2-fluororibose guanine
  modified_base 9: mod_base = OTHER; note = 2-fluororibose guanine
  modified_base 10: mod_base = OTHER; note = 2-O-methylribose adenine
  modified_base 11: mod_base = OTHER; note = 2-fluororibose cytosine
  modified_base 12: mod_base = OTHER; note = 2-O-methylribose adenine
  modified_base 13: mod_base = OTHER; note = 2-fluororibose uracil
  modified_base 14: mod_base = um
  modified_base 15: mod_base = OTHER; note = 2-fluororibose uracil
  modified_base 16: mod_base = um
  modified_base 17: mod_base = OTHER; note = 2-fluororibose uracil
  modified_base 18: mod_base = gm
  modified_base 19: mod_base = OTHER; note = 2-fluororibose adenine
  source 1..19: mol_type = other RNA
catcctaggacatttttga

SEQ ID NO: 554 - RNA, 19 nt, synthetic construct
  misc_feature 1..19: note = Synthetic: WV-42228
  misc_feature 1..19: note = Synthetic: SSR-0104935
  modified_base 1: mod_base = OTHER; note = 2-O-methylribose adenine
  modified_base 2: mod_base = um
  modified_base 3: mod_base = OTHER; note = 2-fluororibose cytosine
  modified_base 4: mod_base = cm
  modified_base 5: mod_base = OTHER; note = 2-fluororibose uracil
  modified_base 6: mod_base = OTHER; note = 2-O-methylribose adenine
  modified_base 7: mod_base = OTHER; note = 2-fluororibose guanine
  modified_base 8: mod_base = OTHER; note = 2-fluororibose guanine
  modified_base 9: mod_base = OTHER; note = 2-fluororibose adenine
  modified_base 10: mod_base = cm
  modified_base 11: mod_base = OTHER; note = 2-fluororibose adenine
  modified_base 12: mod_base = um
  modified_base 13: mod_base = OTHER; note = 2-fluororibose uracil
  modified_base 14: mod_base = um
  modified_base 15: mod_base = OTHER; note = 2-fluororibose uracil
  modified_base 16: mod_base = um
  modified_base 17: mod_base = OTHER; note = 2-fluororibose guanine
  modified_base 18: mod_base = gm
  modified_base 19: mod_base = OTHER; note = 2-fluororibose adenine
  source 1..19: mol_type = other RNA
atcctaggacatttttgga

SEQ ID NO: 555 - RNA, 19 nt, synthetic construct
  misc_feature 1..19: note = Synthetic: WV-42229
  misc_feature 1..19: note = Synthetic: SSR-0105158
  modified_base 1: mod_base = um
  modified_base 2: mod_base = cm
  modified_base 3: mod_base = OTHER; note = 2-fluororibose cytosine
  modified_base 4: mod_base = um
  modified_base 5: mod_base = OTHER; note = 2-fluororibose adenine
  modified_base 6: mod_base = gm
  modified_base 7: mod_base = OTHER; note = 2-fluororibose guanine
  modified_base 8: mod_base = OTHER; note = 2-fluororibose adenine
  modified_base 9: mod_base = OTHER; note = 2-fluororibose cytosine
  modified_base 10: mod_base = OTHER; note = 2-O-methylribose adenine
  modified_base 11: mod_base = OTHER; note = 2-fluororibose uracil
  modified_base 12: mod_base = um
  modified_base 13: mod_base = OTHER; note = 2-fluororibose uracil
  modified_base 14: mod_base = um
  modified_base 15: mod_base = OTHER; note = 2-fluororibose uracil
  modified_base 16: mod_base = gm
  modified_base 17: mod_base = OTHER; note = 2-fluororibose guanine
  modified_base 18: mod_base = OTHER; note = 2-O-methylribose adenine
  modified_base 19: mod_base = OTHER; note = 2-fluororibose adenine
  source 1..19: mol_type = other RNA
tcctaggacatttttggaa

SEQ ID NO: 556 - RNA, 19 nt, synthetic construct
  misc_feature 1..19: note = Synthetic: WV-42230
  misc_feature 1..19: note = Synthetic: SSR-0105172
  modified_base 1: mod_base = um
  modified_base 2: mod_base = um
  modified_base 3: mod_base = OTHER; note = 2-fluororibose uracil
  modified_base 4: mod_base = um
  modified_base 5: mod_base = OTHER; note = 2-fluororibose adenine
  modified_base 6: mod_base = OTHER; note = 2-O-methylribose adenine
  modified_base 7: mod_base = OTHER; note = 2-fluororibose adenine
  modified_base 8: mod_base = OTHER; note = 2-fluororibose uracil
  modified_base 9: mod_base = OTHER; note = 2-fluororibose cytosine
  modified_base 10: mod_base = gm
  modified_base 11: mod_base = OTHER; note = 2-fluororibose uracil
  modified_base 12: mod_base = OTHER; note = 2-O-methylribose adenine
  modified_base 13: mod_base = OTHER; note = 2-fluororibose uracil
  modified_base 14: mod_base = gm
  modified_base 15: mod_base = OTHER; note = 2-fluororibose cytosine
  modified_base 16: mod_base = OTHER; note = 2-O-methylribose adenine
  modified_base 17: mod_base = OTHER; note = 2-fluororibose guanine
  modified_base 18: mod_base = OTHER; note = 2-O-methylribose adenine
  modified_base 19: mod_base = OTHER; note = 2-fluororibose adenine
  source 1..19: mol_type = other RNA
ttttaaatcgtatgcagaa

SEQ ID NO: 557 - RNA, 19 nt, synthetic construct
  misc_feature 1..19: note = Synthetic: WV-42231
  misc_feature 1..19: note = Synthetic: SSR-0105169
  modified_base 1: mod_base = um
  modified_base 2: mod_base = um
  modified_base 3: mod_base = OTHER; note = 2-fluororibose adenine
  modified_base 4: mod_base = OTHER; note = 2-O-methylribose adenine
  modified_base 5: mod_base = OTHER; note = 2-fluororibose adenine
  modified_base 6: mod_base = um
  modified_base 7: mod_base = OTHER; note = 2-fluororibose cytosine
  modified_base 8: mod_base = OTHER; note = 2-fluororibose guanine
  modified_base 9: mod_base = OTHER; note = 2-fluororibose uracil
  modified_base 10: mod_base = OTHER; note = 2-O-methylribose adenine
  modified_base 11: mod_base = OTHER; note = 2-fluororibose uracil
  modified_base 12: mod_base = gm
  modified_base 13: mod_base = OTHER; note = 2-fluororibose cytosine
  modified_base 14: mod_base = OTHER; note = 2-O-methylribose adenine
  modified_base 15: mod_base = OTHER; note = 2-fluororibose guanine
  modified_base 16: mod_base = OTHER; note = 2-O-methylribose adenine
  modified_base 17: mod_base = OTHER; note = 2-fluororibose adenine
  modified_base 18: mod_base = um
  modified_base 19: mod_base = OTHER; note = 2-fluororibose adenine
  source 1..19: mol_type = other RNA
ttaaatcgtatgcagaata

SEQ ID NO: 558 - RNA, 19 nt, synthetic construct
  misc_feature 1..19: note = Synthetic: WV-42232
  misc_feature 1..19: note = Synthetic: SSR-0104915
  modified_base 1: mod_base = OTHER; note = 2-O-methylribose adenine
  modified_base 2: mod_base = OTHER; note = 2-O-methylribose adenine
  modified_base 3: mod_base = OTHER; note = 2-fluororibose adenine
  modified_base 4: mod_base = um
  modified_base 5: mod_base = OTHER; note = 2-fluororibose cytosine
  modified_base 6: mod_base = gm
  modified_base 7: mod_base = OTHER; note = 2-fluororibose uracil
  modified_base 8: mod_base = OTHER; note = 2-fluororibose adenine
  modified_base 9: mod_base = OTHER; note = 2-fluororibose uracil
  modified_base 10: mod_base = gm
  modified_base 11: mod_base = OTHER; note = 2-fluororibose cytosine
  modified_base 12: mod_base = OTHER; note = 2-O-methylribose adenine
  modified_base 13: mod_base = OTHER; note = 2-fluororibose guanine
  modified_base 14: mod_base = OTHER; note = 2-O-methylribose adenine
  modified_base 15: mod_base = OTHER; note = 2-fluororibose adenine
  modified_base 16: mod_base = um
  modified_base 17: mod_base = OTHER; note = 2-fluororibose adenine
  modified_base 18: mod_base = um
  modified_base 19: mod_base = OTHER; note = 2-fluororibose adenine
  source 1..19: mol_type = other RNA
aaatcgtatgcagaatata

SEQ ID NO: 559 - RNA, 19 nt, synthetic construct
  misc_feature 1..19: note = Synthetic: WV-42233
  misc_feature 1..19: note = Synthetic: SSR-0104922
  modified_base 1: mod_base = OTHER; note = 2-O-methylribose adenine
  modified_base 2: mod_base = OTHER; note = 2-O-methylribose adenine
  modified_base 3: mod_base = OTHER; note = 2-fluororibose uracil
  modified_base 4: mod_base = cm
  modified_base 5: mod_base = OTHER; note = 2-fluororibose guanine
  modified_base 6: mod_base = um
  modified_base 7: mod_base = OTHER; note = 2-fluororibose adenine
  modified_base 8: mod_base = OTHER; note = 2-fluororibose uracil
  modified_base 9: mod_base = OTHER; note = 2-fluororibose guanine
  modified_base 10: mod_base = cm
  modified_base 11: mod_base = OTHER; note = 2-fluororibose adenine
  modified_base 12: mod_base = gm
  modified_base 13: mod_base = OTHER; note = 2-fluororibose adenine
  modified_base 14: mod_base = OTHER; note = 2-O-methylribose adenine
  modified_base 15: mod_base = OTHER; note = 2-fluororibose uracil
  modified_base 16: mod_base = OTHER; note = 2-O-methylribose adenine
  modified_base 17: mod_base = OTHER; note = 2-fluororibose uracil
  modified_base 18: mod_base = um
  modified_base 19: mod_base = OTHER; note = 2-fluororibose adenine
  source 1..19: mol_type = other RNA
aatcgtatgcagaatatta

SEQ ID NO: 560 - RNA, 19 nt, synthetic construct
  misc_feature 1..19: note = Synthetic: WV-42234
  misc_feature 1..19: note = Synthetic: SSR-0104937
  modified_base 1: mod_base = OTHER; note = 2-O-methylribose adenine
  modified_base 2: mod_base = um
  modified_base 3: mod_base = OTHER; note = 2-fluororibose cytosine
  modified_base 4: mod_base = gm
  modified_base 5: mod_base = OTHER; note = 2-fluororibose uracil
  modified_base 6: mod_base = OTHER; note = 2-O-methylribose adenine
  modified_base 7: mod_base = OTHER; note = 2-fluororibose uracil
  modified_base 8: mod_base = OTHER; note = 2-fluororibose guanine
  modified_base 9: mod_base = OTHER; note = 2-fluororibose cytosine
  modified_base 10: mod_base = OTHER; note = 2-O-methylribose adenine
  modified_base 11: mod_base = OTHER; note = 2-fluororibose guanine
  modified_base 12: mod_base = OTHER; note = 2-O-methylribose adenine
  modified_base 13: mod_base = OTHER; note = 2-fluororibose adenine
  modified_base 14: mod_base = um
  modified_base 15: mod_base = OTHER; note = 2-fluororibose adenine
  modified_base 16: mod_base = um
  modified_base 17: mod_base = OTHER; note = 2-fluororibose uracil
  modified_base 18: mod_base = cm
  modified_base 19: mod_base = OTHER; note = 2-fluororibose adenine
  source 1..19: mol_type = other RNA
atcgtatgcagaatattca

SEQ ID NO: 561 - RNA, 19 nt, synthetic construct
  misc_feature 1..19: note = Synthetic: WV-42235
  misc_feature 1..19: note = Synthetic: SSR-0105160
  modified_base 1: mod_base = um
  modified_base 2: mod_base = cm
  modified_base 3: mod_base = OTHER; note = 2-fluororibose guanine
  modified_base 4: mod_base = um
  modified_base 5: mod_base = OTHER; note = 2-fluororibose adenine
  modified_base 6: mod_base = um
  modified_base 7: mod_base = OTHER; note = 2-fluororibose guanine
  modified_base 8: mod_base = OTHER; note = 2-fluororibose cytosine
  modified_base 9: mod_base = OTHER; note = 2-fluororibose adenine
  modified_base 10: mod_base = gm
  modified_base 11: mod_base = OTHER; note = 2-fluororibose adenine
  modified_base 12: mod_base = OTHER; note = 2-O-methylribose adenine
  modified_base 13: mod_base = OTHER; note = 2-fluororibose uracil
  modified_base 14: mod_base = OTHER; note = 2-O-methylribose adenine
  modified_base 15: mod_base = OTHER; note = 2-fluororibose uracil
  modified_base 16: mod_base = um
  modified_base 17: mod_base = OTHER; note = 2-fluororibose cytosine
  modified_base 18: mod_base = OTHER; note = 2-O-methylribose adenine
  modified_base 19: mod_base = OTHER; note = 2-fluororibose adenine
  source 1..19: mol_type = other RNA
tcgtatgcagaatattcaa

SEQ ID NO: 562 - RNA, 19 nt, synthetic construct
  misc_feature 1..19: note = Synthetic: WV-42236
  misc_feature 1..19: note = Synthetic: SSR-0104955
  modified_base 1: mod_base = cm
  modified_base 2: mod_base = gm
  modified_base 3: mod_base = OTHER; note = 2-fluororibose uracil
  modified_base 4: mod_base = OTHER; note = 2-O-methylribose adenine
  modified_base 5: mod_base = OTHER; note = 2-fluororibose uracil
  modified_base 6: mod_base = gm
  modified_base 7: mod_base = OTHER; note = 2-fluororibose cytosine
  modified_base 8: mod_base = OTHER; note = 2-fluororibose adenine
  modified_base 9: mod_base = OTHER; note = 2-fluororibose guanine
  modified_base 10: mod_base = OTHER; note = 2-O-methylribose adenine
  modified_base 11: mod_base = OTHER; note = 2-fluororibose adenine
  modified_base 12: mod_base = um
  modified_base 13: mod_base = OTHER; note = 2-fluororibose adenine
  modified_base 14: mod_base = um
  modified_base 15: mod_base = OTHER; note = 2-fluororibose uracil
  modified_base 16: mod_base = cm
  modified_base 17: mod_base = OTHER; note = 2-fluororibose adenine
  modified_base 18: mod_base = OTHER; note = 2-O-methylribose adenine
  modified_base 19: mod_base = OTHER; note = 2-fluororibose adenine
  source 1..19: mol_type = other RNA
cgtatgcagaatattcaaa

SEQ ID NO: 563 - RNA, 19 nt, synthetic construct
  misc_feature 1..19: note = Synthetic: WV-42237
  misc_feature 1..19: note = Synthetic: SSR-0105153
  modified_base 1: mod_base = um
  modified_base 2: mod_base = OTHER; note = 2-O-methylribose adenine
  modified_base 3: mod_base = OTHER; note = 2-fluororibose uracil
  modified_base 4: mod_base = gm
  modified_base 5: mod_base = OTHER; note = 2-fluororibose cytosine
  modified_base 6: mod_base = OTHER; note = 2-O-methylribose adenine
  modified_base 7: mod_base = OTHER; note = 2-fluororibose guanine
  modified_base 8: mod_base = OTHER; note = 2-fluororibose adenine
  modified_base 9: mod_base = OTHER; note = 2-fluororibose adenine
  modified_base 10: mod_base = um
  modified_base 11: mod_base = OTHER; note = 2-fluororibose adenine
  modified_base 12: mod_base = um
  modified_base 13: mod_base = OTHER; note = 2-fluororibose uracil
  modified_base 14: mod_base = cm
  modified_base 15: mod_base = OTHER; note = 2-fluororibose adenine
  modified_base 16: mod_base = OTHER; note = 2-O-methylribose adenine
  modified_base 17: mod_base = OTHER; note = 2-fluororibose uracil
  modified_base 18: mod_base = um
  modified_base 19: mod_base = OTHER; note = 2-fluororibose adenine
  source 1..19: mol_type = other RNA
tatgcagaatattcaatta

SEQ ID NO: 564 - RNA, 19 nt, synthetic construct
  misc_feature 1..19: note = Synthetic: WV-42238
  misc_feature 1..19: note = Synthetic: SSR-0105163
  modified_base 1: mod_base = um
  modified_base 2: mod_base = gm
  modified_base 3: mod_base = OTHER; note = 2-fluororibose cytosine
  modified_base 4: mod_base = OTHER; note = 2-O-methylribose adenine
  modified_base 5: mod_base = OTHER; note = 2-fluororibose guanine
  modified_base 6: mod_base = OTHER; note = 2-O-methylribose adenine
  modified_base 7: mod_base = OTHER; note = 2-fluororibose adenine
  modified_base 8: mod_base = OTHER; note = 2-fluororibose uracil
  modified_base 9: mod_base = OTHER; note = 2-fluororibose adenine
  modified_base 10: mod_base = um
  modified_base 11: mod_base = OTHER; note = 2-fluororibose uracil
  modified_base 12: mod_base = cm
  modified_base 13: mod_base = OTHER; note = 2-fluororibose adenine
  modified_base 14: mod_base = OTHER; note = 2-O-methylribose adenine
  modified_base 15: mod_base = OTHER; note = 2-fluororibose uracil
  modified_base 16: mod_base = um
  modified_base 17: mod_base = OTHER; note = 2-fluororibose uracil
  modified_base 18: mod_base = gm
  modified_base 19: mod_base = OTHER; note = 2-fluororibose adenine
  source 1..19: mol_type = other RNA
tgcagaatattcaatttga

SEQ ID NO: 565 - RNA, 19 nt, synthetic construct
  misc_feature 1..19: note = Synthetic: WV-42239
  misc_feature 1..19: note = Synthetic: SSR-0104944
  modified_base 1: mod_base = cm
  modified_base 2: mod_base = OTHER; note = 2-O-methylribose adenine
  modified_base 3: mod_base = OTHER; note = 2-fluororibose adenine
  modified_base 4: mod_base = cm
  modified_base 5: mod_base = OTHER; note = 2-fluororibose uracil
  modified_base 6: mod_base = cm
  modified_base 7: mod_base = OTHER; note = 2-fluororibose uracil
  modified_base 8: mod_base = OTHER; note = 2-fluororibose adenine
  modified_base 9: mod_base = OTHER; note = 2-fluororibose uracil
  modified_base 10: mod_base = um
  modified_base 11: mod_base = OTHER; note = 2-fluororibose cytosine
  modified_base 12: mod_base = um
  modified_base 13: mod_base = OTHER; note = 2-fluororibose guanine
  modified_base 14: mod_base = gm
  modified_base 15: mod_base = OTHER; note = 2-fluororibose adenine
  modified_base 16: mod_base = cm
  modified_base 17: mod_base = OTHER; note = 2-fluororibose uracil
  modified_base 18: mod_base = um
  modified_base 19: mod_base = OTHER; note = 2-fluororibose adenine
  source 1..19: mol_type = other RNA
caactctattctggactta

SEQ ID NO: 566 - RNA, 19 nt, synthetic construct
  misc_feature 1..19: note = Synthetic: WV-42240
  misc_feature 1..19: note = Synthetic: SSR-0104917
  modified_base 1: mod_base = OTHER; note = 2-O-methylribose adenine
  modified_base 2: mod_base = OTHER; note = 2-O-methylribose adenine
  modified_base 3: mod_base = OTHER; note = 2-fluororibose cytosine
  modified_base 4: mod_base = um
  modified_base 5: mod_base = OTHER; note = 2-fluororibose cytosine
  modified_base 6: mod_base = um
  modified_base 7: mod_base = OTHER; note = 2-fluororibose adenine
  modified_base 8: mod_base = OTHER; note = 2-fluororibose uracil
  modified_base 9: mod_base = OTHER; note = 2-fluororibose uracil
  modified_base 10: mod_base = cm
  modified_base 11: mod_base = OTHER; note = 2-fluororibose uracil
  modified_base 12: mod_base = gm
  modified_base 13: mod_base = OTHER; note = 2-fluororibose guanine
  modified_base 14: mod_base = OTHER; note = 2-O-methylribose adenine
  modified_base 15: mod_base = OTHER; note = 2-fluororibose cytosine
  modified_base 16: mod_base = um
  modified_base 17: mod_base = OTHER; note = 2-fluororibose uracil
  modified_base 18: mod_base = um
  modified_base 19: mod_base = OTHER; note = 2-fluororibose adenine
  source 1..19: mol_type = other RNA
aactctattctggacttta

SEQ ID NO: 567 - RNA, 19 nt, synthetic construct
  misc_feature 1..19: note = Synthetic: WV-42241
  misc_feature 1..19: note = Synthetic: SSR-0104930
  modified_base 1: mod_base = OTHER; note = 2-O-methylribose adenine
  modified_base 2: mod_base = cm
  modified_base 3: mod_base = OTHER; note = 2-fluororibose uracil
  modified_base 4: mod_base = cm
  modified_base 5: mod_base = OTHER; note = 2-fluororibose uracil
  modified_base 6: mod_base = OTHER; note = 2-O-methylribose adenine
  modified_base 7: mod_base = OTHER; note = 2-fluororibose uracil
  modified_base 8: mod_base = OTHER; note = 2-fluororibose uracil
  modified_base 9: mod_base = OTHER; note = 2-fluororibose cytosine
  modified_base 10: mod_base = um
  modified_base 11: mod_base = OTHER; note = 2-fluororibose guanine
  modified_base 12: mod_base = gm
  modified_base 13: mod_base = OTHER; note = 2-fluororibose adenine
  modified_base 14: mod_base = cm
  modified_base 15: mod_base = OTHER; note = 2-fluororibose uracil
  modified_base 16: mod_base = um
  modified_base 17: mod_base = OTHER; note = 2-fluororibose uracil
  modified_base 18: mod_base = OTHER; note = 2-O-methylribose adenine
  modified_base 19: mod_base = OTHER; note = 2-fluororibose adenine
  source 1..19: mol_type = other RNA
actctattctggactttaa

SEQ ID NO: 568 - RNA, 19 nt, synthetic construct
  misc_feature 1..19: note = Synthetic: WV-42242
  misc_feature 1..19: note = Synthetic: SSR-0105161
  modified_base 1: mod_base = um
  modified_base 2: mod_base = cm
  modified_base 3: mod_base = OTHER; note = 2-fluororibose uracil
  modified_base 4: mod_base = OTHER; note = 2-O-methylribose adenine
  modified_base 5: mod_base = OTHER; note = 2-fluororibose uracil
  modified_base 6: mod_base = um
  modified_base 7: mod_base = OTHER; note = 2-fluororibose cytosine
  modified_base 8: mod_base = OTHER; note = 2-fluororibose uracil
  modified_base 9: mod_base = OTHER; note = 2-fluororibose guanine
  modified_base 10: mod_base = gm
  modified_base 11: mod_base = OTHER; note = 2-fluororibose adenine
  modified_base 12: mod_base = cm
  modified_base 13: mod_base = OTHER; note = 2-fluororibose uracil
  modified_base 14: mod_base = um
  modified_base 15: mod_base = OTHER; note = 2-fluororibose uracil
  modified_base 16: mod_base = OTHER; note = 2-O-methylribose adenine
  modified_base 17: mod_base = OTHER; note = 2-fluororibose uracil
  modified_base 18: mod_base = um
  modified_base 19: mod_base = OTHER; note = 2-fluororibose adenine
  source 1..19: mol_type = other RNA
tctattctggactttatta

SEQ ID NO: 569 - RNA, 19 nt, synthetic construct
  misc_feature 1..19: note = Synthetic: WV-42243
  misc_feature 1..19: note = Synthetic: SSR-0105162
  modified_base 1: mod_base = um
  modified_base 2: mod_base = cm
  modified_base 3: mod_base = OTHER; note = 2-fluororibose uracil
  modified_base 4: mod_base = gm
  modified_base 5: mod_base = OTHER; note = 2-fluororibose guanine
  modified_base 6: mod_base = OTHER; note = 2-O-methylribose adenine
  modified_base 7: mod_base = OTHER; note = 2-fluororibose cytosine
  modified_base 8: mod_base = OTHER; note = 2-fluororibose uracil
  modified_base 9: mod_base = OTHER; note = 2-fluororibose uracil
  modified_base 10: mod_base = um
  modified_base 11: mod_base = OTHER; note = 2-fluororibose adenine
  modified_base 12: mod_base = um
  modified_base 13: mod_base = OTHER; note = 2-fluororibose uracil
  modified_base 14: mod_base = OTHER; note = 2-O-methylribose adenine
  modified_base 15: mod_base = OTHER; note = 2-fluororibose cytosine
  modified_base 16: mod_base = um
  modified_base 17: mod_base = OTHER; note = 2-fluororibose uracil
  modified_base 18: mod_base = gm
  modified_base 19: mod_base = OTHER; note = 2-fluororibose adenine
  source 1..19: mol_type = other RNA
tctggactttattacttga

SEQ ID NO: 570 - RNA, 19 nt, synthetic construct
  misc_feature 1..19: note = Synthetic: WV-42244
  misc_feature 1..19: note = Synthetic: SSR-0104946
  modified_base 1: mod_base = cm
  modified_base 2: mod_base = OTHER; note = 2-O-methylribose adenine
  modified_base 3: mod_base = OTHER; note = 2-fluororibose cytosine
  modified_base 4: mod_base = cm
  modified_base 5: mod_base = OTHER; note = 2-fluororibose adenine
  modified_base 6: mod_base = OTHER; note = 2-O-methylribose adenine
  modified_base 7: mod_base = OTHER; note = 2-fluororibose adenine
  modified_base 8: mod_base = OTHER; note = 2-fluororibose adenine
  modified_base 9: mod_base = OTHER; note = 2-fluororibose guanine
  modified_base 10: mod_base = um
  modified_base 11: mod_base = OTHER; note = 2-fluororibose guanine
  modified_base 12: mod_base = gm
  modified_base 13: mod_base = OTHER; note = 2-fluororibose adenine
  modified_base 14: mod_base = cm
  modified_base 15: mod_base = OTHER; note = 2-fluororibose cytosine
  modified_base 16: mod_base = cm
  modified_base 17: mod_base = OTHER; note = 2-fluororibose uracil
  modified_base 18: mod_base = cm
  modified_base 19: mod_base = OTHER; note = 2-fluororibose adenine
  source 1..19: mol_type = other RNA
caccaaaagtggaccctca

SEQ ID NO: 571 - RNA, 19 nt, synthetic construct
  misc_feature 1..19: note = Synthetic: WV-42245
  misc_feature 1..19: note = Synthetic: SSR-0104927
  modified_base 1: mod_base = OTHER; note = 2-O-methylribose adenine
  modified_base 2: mod_base = cm
  modified_base 3: mod_base = OTHER; note = 2-fluororibose cytosine
  modified_base 4: mod_base = OTHER; note = 2-O-methylribose adenine
  modified_base 5: mod_base = OTHER; note = 2-fluororibose adenine
  modified_base 6: mod_base = OTHER; note = 2-O-methylribose adenine
  modified_base 7: mod_base = OTHER; note = 2-fluororibose adenine
  modified_base 8: mod_base = OTHER; note = 2-fluororibose guanine
  modified_base 9: mod_base = OTHER; note = 2-fluororibose uracil
  modified_base 10: mod_base = gm
  modified_base 11: mod_base = OTHER; note = 2-fluororibose guanine
  modified_base 12: mod_base = OTHER; note = 2-O-methylribose adenine
  modified_base 13: mod_base = OTHER; note = 2-fluororibose cytosine
  modified_base 14: mod_base = cm
  modified_base 15: mod_base = OTHER; note = 2-fluororibose cytosine
  modified_base 16: mod_base = um
  modified_base 17: mod_base = OTHER; note = 2-fluororibose cytosine
  modified_base 18: mod_base = um
  modified_base 19: mod_base = OTHER; note = 2-fluororibose adenine
  source 1..19: mol_type = other RNA
accaaaagtggaccctcta

SEQ ID NO: 572 - RNA, 19 nt, synthetic construct
  misc_feature 1..19: note = Synthetic: WV-42246
  misc_feature 1..19: note = Synthetic: SSR-0104951
  modified_base 1: mod_base = cm
  modified_base 2: mod_base = cm
  modified_base 3: mod_base = OTHER; note = 2-fluororibose adenine
  modified_base 4: mod_base = OTHER; note = 2-O-methylribose adenine
  modified_base 5: mod_base = OTHER; note = 2-fluororibose adenine
  modified_base 6: mod_base = OTHER; note = 2-O-methylribose adenine
  modified_base 7: mod_base = OTHER; note = 2-fluororibose guanine
  modified_base 8: mod_base = OTHER; note = 2-fluororibose uracil
  modified_base 9: mod_base = OTHER; note = 2-fluororibose guanine
  modified_base 10: mod_base = gm
  modified_base 11: mod_base = OTHER; note = 2-fluororibose adenine
  modified_base 12: mod_base = cm
  modified_base 13: mod_base = OTHER; note = 2-fluororibose cytosine
  modified_base 14: mod_base = cm
  modified_base 15: mod_base = OTHER; note = 2-fluororibose uracil
  modified_base 16: mod_base = cm
  modified_base 17: mod_base = OTHER; note = 2-fluororibose uracil
  modified_base 18: mod_base = OTHER; note = 2-O-methylribose adenine
  modified_base 19: mod_base = OTHER; note = 2-fluororibose adenine
  source 1..19: mol_type = other RNA
ccaaaagtggaccctctaa

SEQ ID NO: 573 - RNA, 19 nt, synthetic construct
  misc_feature 1..19: note = Synthetic: WV-42247
  misc_feature 1..19: note = Synthetic: SSR-0104943
  modified_base 1: mod_base = cm
  modified_base 2: mod_base = OTHER; note = 2-O-methylribose adenine
  modified_base 3: mod_base = OTHER; note = 2-fluororibose adenine
  modified_base 4: mod_base = OTHER; note = 2-O-methylribose adenine
  modified_base 5: mod_base = OTHER; note = 2-fluororibose adenine
  modified_base 6: mod_base = gm
  modified_base 7: mod_base = OTHER; note = 2-fluororibose uracil
  modified_base 8: mod_base = OTHER; note = 2-fluororibose guanine
  modified_base 9: mod_base = OTHER; note = 2-fluororibose guanine
  modified_base 10: mod_base = OTHER; note = 2-O-methylribose adenine
  modified_base 11: mod_base = OTHER; note = 2-fluororibose cytosine
  modified_base 12: mod_base = cm
  modified_base 13: mod_base = OTHER; note = 2-fluororibose cytosine
  modified_base 14: mod_base = um
  modified_base 15: mod_base = OTHER; note = 2-fluororibose cytosine
  modified_base 16: mod_base = um
  modified_base 17: mod_base = OTHER; note = 2-fluororibose adenine
  modified_base 18: mod_base = um
  modified_base 19: mod_base = OTHER; note = 2-fluororibose adenine
  source 1..19: mol_type = other RNA
caaaagtggaccctctata

SEQ ID NO: 574 - RNA, 19 nt, synthetic construct
  misc_feature 1..19: note = Synthetic: WV-42248
  misc_feature 1..19: note = Synthetic: SSR-0104912
  modified_base 1: mod_base = OTHER; note = 2-O-methylribose adenine
  modified_base 2: mod_base = OTHER; note = 2-O-methylribose adenine
  modified_base 3: mod_base = OTHER; note = 2-fluororibose adenine
  modified_base 4: mod_base = OTHER; note = 2-O-methylribose adenine
  modified_base 5: mod_base = OTHER; note = 2-fluororibose guanine
  modified_base 6: mod_base = um
  modified_base 7: mod_base = OTHER; note = 2-fluororibose guanine
  modified_base 8: mod_base = OTHER; note = 2-fluororibose guanine
  modified_base 9: mod_base = OTHER; note = 2-fluororibose adenine
  modified_base 10: mod_base = cm
  modified_base 11: mod_base = OTHER; note = 2-fluororibose cytosine
  modified_base 12: mod_base = cm
  modified_base 13: mod_base = OTHER; note = 2-fluororibose uracil
  modified_base 14: mod_base = cm
  modified_base 15: mod_base = OTHER; note = 2-fluororibose uracil
  modified_base 16: mod_base = OTHER; note = 2-O-methylribose adenine
  modified_base 17: mod_base = OTHER; note = 2-fluororibose uracil
  modified_base 18: mod_base = OTHER; note = 2-O-methylribose adenine
  modified_base 19: mod_base = OTHER; note = 2-fluororibose adenine
  source 1..19: mol_type = other RNA
aaaagtggaccctctataa

SEQ ID NO: 575 - RNA, 19 nt, synthetic construct
  misc_feature 1..19: note = Synthetic: WV-42249
  misc_feature 1..19: note = Synthetic: SSR-0104958
  modified_base 1: mod_base = cm
  modified_base 2: mod_base = um
  modified_base 3: mod_base = OTHER; note = 2-fluororibose cytosine
  modified_base 4: mod_base = um
  modified_base 5: mod_base = OTHER; note = 2-fluororibose adenine
  modified_base 6: mod_base = um
  modified_base 7: mod_base = OTHER; note = 2-fluororibose adenine
  modified_base 8: mod_base = OTHER; note = 2-fluororibose uracil
  modified_base 9: mod_base = OTHER; note = 2-fluororibose uracil
  modified_base 10: mod_base = um
  modified_base 11: mod_base = OTHER; note = 2-fluororibose cytosine
  modified_base 12: mod_base = cm
  modified_base 13: mod_base = OTHER; note = 2-fluororibose uracil
  modified_base 14: mod_base = cm
  modified_base 15: mod_base = OTHER; note = 2-fluororibose cytosine
  modified_base 16: mod_base = cm
  modified_base 17: mod_base = OTHER; note = 2-fluororibose uracil
  modified_base 18: mod_base = um
  modified_base 19: mod_base = OTHER; note = 2-fluororibose adenine
  source 1..19: mol_type = other RNA
ctctatatttcctccctta

SEQ ID NO: 576 - RNA, 19 nt, synthetic construct
  misc_feature 1..19: note = Synthetic: WV-42250
  misc_feature 1..19: note = Synthetic: SSR-0105149
  modified_base 1: mod_base = um
  modified_base 2: mod_base = OTHER; note = 2-O-methylribose adenine
  modified_base 3: mod_base = OTHER; note = 2-fluororibose guanine
  modified_base 4: mod_base = OTHER; note = 2-O-methylribose adenine
  modified_base 5: mod_base = OTHER; note = 2-fluororibose cytosine
  modified_base 6: mod_base = OTHER; note = 2-O-methylribose adenine
  modified_base 7: mod_base = OTHER; note = 2-fluororibose adenine
  modified_base 8: mod_base = OTHER; note = 2-fluororibose uracil
  modified_base 9: mod_base = OTHER; note = 2-fluororibose uracil
  modified_base 10: mod_base = um
  modified_base 11: mod_base = OTHER; note = 2-fluororibose uracil
  modified_base 12: mod_base = OTHER; note = 2-O-methylribose adenine
  modified_base 13: mod_base = OTHER; note = 2-fluororibose guanine
  modified_base 14: mod_base = gm
  modified_base 15: mod_base = OTHER; note = 2-fluororibose cytosine
  modified_base 16: mod_base = um
  modified_base 17: mod_base = OTHER; note = 2-fluororibose cytosine
  modified_base 18: mod_base = OTHER; note = 2-O-methylribose adenine
  modified_base 19: mod_base = OTHER; note = 2-fluororibose adenine
  source 1..19: mol_type = other RNA
tagacaattttaggctcaa

SEQ ID NO: 577 - RNA, 19 nt, synthetic construct
  misc_feature 1..19: note = Synthetic: WV-42251
  misc_feature 1..19: note = Synthetic: SSR-0104924
  modified_base 1: mod_base = OTHER; note = 2-O-methylribose adenine
  modified_base 2: mod_base = cm
  modified_base 3: mod_base = OTHER; note = 2-fluororibose adenine
  modified_base 4: mod_base = OTHER; note = 2-O-methylribose adenine
  modified_base 5: mod_base = OTHER; note = 2-fluororibose uracil
  modified_base 6: mod_base = um
  modified_base 7: mod_base = OTHER; note = 2-fluororibose uracil
  modified_base 8: mod_base = OTHER; note = 2-fluororibose uracil
  modified_base 9: mod_base = OTHER; note = 2-fluororibose adenine
  modified_base 10: mod_base = gm
  modified_base 11: mod_base = OTHER; note = 2-fluororibose guanine
  modified_base 12: mod_base = cm
  modified_base 13: mod_base = OTHER; note = 2-fluororibose uracil
  modified_base 14: mod_base = cm
  modified_base 15: mod_base = OTHER; note = 2-fluororibose adenine
  modified_base 16: mod_base = OTHER; note = 2-O-methylribose adenine
  modified_base 17: mod_base = OTHER; note = 2-fluororibose adenine
  modified_base 18: mod_base = OTHER; note = 2-O-methylribose adenine
  modified_base 19: mod_base = OTHER; note = 2-fluororibose adenine
  source 1..19: mol_type = other RNA
acaattttaggctcaaaaa

SEQ ID NO: 578 - RNA, 19 nt, synthetic construct
  misc_feature 1..19: note = Synthetic: WV-42252
  misc_feature 1..19: note = Synthetic: SSR-0104945
  modified_base 1: mod_base = cm
  modified_base 2: mod_base = OTHER; note = 2-O-methylribose adenine
  modified_base 3: mod_base = OTHER; note = 2-fluororibose cytosine
  modified_base 4: mod_base = OTHER; note = 2-O-methylribose adenine
  modified_base 5: mod_base = OTHER; note = 2-fluororibose guanine
  modified_base 6: mod_base = gm
  modified_base 7: mod_base = OTHER; note = 2-fluororibose adenine
  modified_base 8: mod_base = OTHER; note = 2-fluororibose adenine
  modified_base 9: mod_base = OTHER; note = 2-fluororibose adenine
  modified_base 10: mod_base = OTHER; note = 2-O-methylribose adenine
  modified_base 11: mod_base = OTHER; note = 2-fluororibose guanine
  modified_base 12: mod_base = gm
  modified_base 13: mod_base = OTHER; note = 2-fluororibose adenine
  modified_base 14: mod_base = OTHER; note = 2-O-methylribose adenine
  modified_base 15: mod_base = OTHER; note = 2-fluororibose cytosine
  modified_base 16: mod_base = um
  modified_base 17: mod_base = OTHER; note = 2-fluororibose guanine
  modified_base 18: mod_base = um
  modified_base 19: mod_base = OTHER; note = 2-fluororibose adenine
  source 1..19: mol_type = other RNA
cacaggaaaaggaactgta

SEQ ID NO: 579 - RNA, 19 nt, synthetic construct
  misc_feature 1..19: note = Synthetic: WV-42253
  misc_feature 1..19: note = Synthetic: SSR-0104960
  modified_base 1: mod_base = gm
  modified_base 2: mod_base = OTHER; note = 2-O-methylribose adenine
  modified_base 3: mod_base = OTHER; note = 2-fluororibose adenine
  modified_base 4: mod_base = cm
  modified_base 5: mod_base = OTHER; note = 2-fluororibose uracil
  modified_base 6: mod_base = gm
  modified_base 7: mod_base = OTHER; note = 2-fluororibose uracil
  modified_base 8: mod_base = OTHER; note = 2-fluororibose adenine
  modified_base 9: mod_base = OTHER; note = 2-fluororibose cytosine
  modified_base 10: mod_base = um
  modified_base 11: mod_base = OTHER; note = 2-fluororibose guanine
  modified_base 12: mod_base = gm
  modified_base 13: mod_base = OTHER; note = 2-fluororibose cytosine
  modified_base 14: mod_base = um
  modified_base 15: mod_base = OTHER; note = 2-fluororibose adenine
  modified_base 16: mod_base = um
  modified_base 17: mod_base = OTHER; note = 2-fluororibose uracil
  modified_base 18: mod_base = OTHER; note = 2-O-methylribose adenine
  modified_base 19: mod_base = OTHER; note = 2-fluororibose adenine
  source 1..19: mol_type = other RNA
gaactgtactggctattaa

SEQ ID NO: 580 - RNA, 19 nt, synthetic construct
  misc_feature 1..19: note = Synthetic: WV-42254
  misc_feature 1..19: note = Synthetic: SSR-0104918
  modified_base 1: mod_base = OTHER; note = 2-O-methylribose adenine
  modified_base 2: mod_base = OTHER; note = 2-O-methylribose adenine
  modified_base 3: mod_base = OTHER; note = 2-fluororibose cytosine
  modified_base 4: mod_base = um
  modified_base 5: mod_base = OTHER; note = 2-fluororibose guanine
  modified_base 6: mod_base = um
  modified_base 7: mod_base = OTHER; note = 2-fluororibose adenine
  modified_base 8: mod_base = OTHER; note = 2-fluororibose cytosine
  modified_base 9: mod_base = OTHER; note = 2-fluororibose uracil
  modified_base 10: mod_base = gm
  modified_base 11: mod_base = OTHER; note = 2-fluororibose guanine
  modified_base 12: mod_base = cm
  modified_base 13: mod_base = OTHER; note = 2-fluororibose uracil
  modified_base 14: mod_base = OTHER; note = 2-O-methylribose adenine
  modified_base 15: mod_base = OTHER; note = 2-fluororibose uracil
  modified_base 16: mod_base = um
  modified_base 17: mod_base = OTHER; note = 2-fluororibose adenine
  modified_base 18: mod_base = cm
  modified_base 19: mod_base = OTHER; note = 2-fluororibose adenine
  source 1..19: mol_type = other RNA
aactgtactggctattaca

SEQ ID NO: 581 - RNA, 19 nt, synthetic construct
  misc_feature 1..19: note = Synthetic: WV-42255
  misc_feature 1..19: note = Synthetic: SSR-0104920
  modified_base 1: mod_base = OTHER; note = 2-O-methylribose adenine
  modified_base 2: mod_base = OTHER; note = 2-O-methylribose adenine
  modified_base 3: mod_base = OTHER; note = 2-fluororibose uracil
  modified_base 4: mod_base = OTHER; note = 2-O-methylribose adenine
  modified_base 5: mod_base = OTHER; note = 2-fluororibose adenine
  modified_base 6: mod_base = um
  modified_base 7: mod_base = OTHER; note = 2-fluororibose cytosine
  modified_base 8: mod_base = OTHER; note = 2-fluororibose cytosine
  modified_base 9: mod_base = OTHER; note = 2-fluororibose guanine
  modified_base 10: mod_base = OTHER; note = 2-O-methylribose adenine
  modified_base 11: mod_base = OTHER; note = 2-fluororibose cytosine
  modified_base 12: mod_base = um
  modified_base 13: mod_base = OTHER; note = 2-fluororibose cytosine
  modified_base 14: mod_base = cm
  modified_base 15: mod_base = OTHER; note = 2-fluororibose cytosine
  modified_base 16: mod_base = OTHER; note = 2-O-methylribose adenine
  modified_base 17: mod_base = OTHER; note = 2-fluororibose cytosine
  modified_base 18: mod_base = um
  modified_base 19: mod_base = OTHER; note = 2-fluororibose adenine
  source 1..19: mol_type = other RNA
aataatccgactcccacta

SEQ ID NO: 582 - RNA, 19 nt, synthetic construct
  misc_feature 1..19: note = Synthetic: WV-42256
  misc_feature 1..19: note = Synthetic: SSR-0105147
  modified_base 1: mod_base = um
  modified_base 2: mod_base = OTHER; note = 2-O-methylribose adenine
  modified_base 3: mod_base = OTHER; note = 2-fluororibose adenine
  modified_base 4: mod_base = um
  modified_base 5: mod_base = OTHER; note = 2-fluororibose cytosine
  modified_base 6: mod_base = cm
  modified_base 7: mod_base = OTHER; note = 2-fluororibose guanine
  modified_base 8: mod_base = OTHER; note = 2-fluororibose adenine
  modified_base 9: mod_base = OTHER; note = 2-fluororibose cytosine
  modified_base 10: mod_base = um
  modified_base 11: mod_base = OTHER; note = 2-fluororibose cytosine
  modified_base 12: mod_base = cm
  modified_base 13: mod_base = OTHER; note = 2-fluororibose cytosine
  modified_base 14: mod_base = OTHER; note = 2-O-methylribose adenine
  modified_base 15: mod_base = OTHER; note = 2-fluororibose cytosine
  modified_base 16: mod_base = um
  modified_base 17: mod_base = OTHER; note = 2-fluororibose adenine
  modified_base 18: mod_base = cm
  modified_base 19: mod_base = OTHER; note = 2-fluororibose adenine
  source 1..19: mol_type = other RNA
taatccgactcccactaca

SEQ ID NO: 583 - RNA, 19 nt, synthetic construct
  misc_feature 1..19: note = Synthetic: WV-42257
  misc_feature 1..19: note = Synthetic: SSR-0104921
  modified_base 1: mod_base = OTHER; note = 2-O-methylribose adenine
  modified_base 2: mod_base = OTHER; note = 2-O-methylribose adenine
  modified_base 3: mod_base = OTHER; note = 2-fluororibose uracil
  modified_base 4: mod_base = cm
  modified_base 5: mod_base = OTHER; note = 2-fluororibose cytosine
  modified_base 6: mod_base = gm
  modified_base 7: mod_base = OTHER; note = 2-fluororibose adenine
  modified_base 8: mod_base = OTHER; note = 2-fluororibose cytosine
  modified_base 9: mod_base = OTHER; note = 2-fluororibose uracil
  modified_base 10: mod_base = cm
  modified_base 11: mod_base = OTHER; note = 2-fluororibose cytosine
  modified_base 12: mod_base = cm
  modified_base 13: mod_base = OTHER; note = 2-fluororibose adenine
  modified_base 14: mod_base = cm
  modified_base 15: mod_base = OTHER; note = 2-fluororibose uracil
  modified_base 16: mod_base = OTHER; note = 2-O-methylribose adenine
  modified_base 17: mod_base = OTHER; note = 2-fluororibose cytosine
  modified_base 18: mod_base = OTHER; note = 2-O-methylribose adenine
  modified_base 19: mod_base = OTHER; note = 2-fluororibose adenine
  source 1..19: mol_type = other RNA
aatccgactcccactacaa

SEQ ID NO: 584 - RNA, 19 nt, synthetic construct
  misc_feature 1..19: note = Synthetic: WV-42258
  misc_feature 1..19: note = Synthetic: SSR-0105157
  modified_base 1: mod_base = um
  modified_base 2: mod_base = cm
  modified_base 3: mod_base = OTHER; note = 2-fluororibose cytosine
  modified_base 4: mod_base = gm
  modified_base 5: mod_base = OTHER; note = 2-fluororibose adenine
  modified_base 6: mod_base = cm
  modified_base 7: mod_base = OTHER; note = 2-fluororibose uracil
  modified_base 8: mod_base = OTHER; note = 2-fluororibose cytosine
  modified_base 9: mod_base = OTHER; note = 2-fluororibose cytosine
  modified_base 10: mod_base = cm
  modified_base 11: mod_base = OTHER; note = 2-fluororibose adenine
  modified_base 12: mod_base = cm
  modified_base 13: mod_base = OTHER; note = 2-fluororibose uracil
  modified_base 14: mod_base = OTHER; note = 2-O-methylribose adenine
  modified_base 15: mod_base = OTHER; note = 2-fluororibose cytosine
  modified_base 16: mod_base = OTHER; note = 2-O-methylribose adenine
  modified_base 17: mod_base = OTHER; note = 2-fluororibose uracil
  modified_base 18: mod_base = cm
  modified_base 19: mod_base = OTHER; note = 2-fluororibose adenine
  source 1..19: mol_type = other RNA
tccgactcccactacatca

SEQ ID NO: 585 - RNA, 19 nt, synthetic construct
  misc_feature 1..19: note = Synthetic: WV-42259
  misc_feature 1..19: note = Synthetic: SSR-0104953
  modified_base 1: mod_base = cm
  modified_base 2: mod_base = cm
  modified_base 3: mod_base = OTHER; note = 2-fluororibose guanine
  modified_base 4: mod_base = OTHER; note = 2-O-methylribose adenine
  modified_base 5: mod_base = OTHER; note = 2-fluororibose cytosine
  modified_base 6: mod_base = um
  modified_base 7: mod_base = OTHER; note = 2-fluororibose cytosine
  modified_base 8: mod_base = OTHER; note = 2-fluororibose cytosine
  modified_base 9: mod_base = OTHER; note = 2-fluororibose cytosine
  modified_base 10: mod_base = OTHER; note = 2-O-methylribose adenine
  modified_base 11: mod_base = OTHER; note = 2-fluororibose cytosine
  modified_base 12: mod_base = um
  modified_base 13: mod_base = OTHER; note = 2-fluororibose adenine
  modified_base 14: mod_base = cm
  modified_base 15: mod_base = OTHER; note = 2-fluororibose adenine
  modified_base 16: mod_base = um
  modified_base 17: mod_base = OTHER; note = 2-fluororibose cytosine
  modified_base 18: mod_base = OTHER; note = 2-O-methylribose adenine
  modified_base 19: mod_base = OTHER; note = 2-fluororibose adenine
  source 1..19: mol_type = other RNA
ccgactcccactacatcaa

SEQ ID NO: 586 - RNA, 19 nt, synthetic construct
  misc_feature 1..19: note = Synthetic: WV-42260
  misc_feature 1..19: note = Synthetic: SSR-0104954
  modified_base 1: mod_base = cm
  modified_base 2: mod_base = gm
  modified_base 3: mod_base = OTHER; note = 2-fluororibose adenine
  modified_base 4: mod_base = cm
  modified_base 5: mod_base = OTHER; note = 2-fluororibose uracil
  modified_base 6: mod_base = cm
  modified_base 7: mod_base = OTHER; note = 2-fluororibose cytosine
  modified_base 8: mod_base = OTHER; note = 2-fluororibose cytosine
  modified_base 9: mod_base = OTHER; note = 2-fluororibose adenine
  modified_base 10: mod_base = cm
  modified_base 11: mod_base = OTHER; note = 2-fluororibose uracil
  modified_base 12: mod_base = OTHER; note = 2-O-methylribose adenine
  modified_base 13: mod_base = OTHER; note = 2-fluororibose cytosine
  modified_base 14: mod_base = OTHER; note = 2-O-methylribose adenine
  modified_base 15: mod_base = OTHER; note = 2-fluororibose uracil
  modified_base 16: mod_base = cm
  modified_base 17: mod_base = OTHER; note = 2-fluororibose adenine
  modified_base 18: mod_base = OTHER; note = 2-O-methylribose adenine
  modified_base 19: mod_base = OTHER; note = 2-fluororibose adenine
  source 1..19: mol_type = other RNA
cgactcccactacatcaaa

SEQ ID NO: 587 - RNA, 19 nt, synthetic construct
  misc_feature 1..19: note = Synthetic: WV-42261
  misc_feature 1..19: note = Synthetic: SSR-0104963
  modified_base 1: mod_base = gm
  modified_base 2: mod_base = OTHER; note = 2-O-methylribose adenine
  modified_base 3: mod_base = OTHER; note = 2-fluororibose cytosine
  modified_base 4: mod_base = um
  modified_base 5: mod_base = OTHER; note = 2-fluororibose cytosine
  modified_base 6: mod_base = cm
  modified_base 7: mod_base = OTHER; note = 2-fluororibose cytosine
  modified_base 8: mod_base = OTHER; note = 2-fluororibose adenine
  modified_base 9: mod_base = OTHER; note = 2-fluororibose cytosine
  modified_base 10: mod_base = um
  modified_base 11: mod_base = OTHER; note = 2-fluororibose adenine
  modified_base 12: mod_base = cm
  modified_base 13: mod_base = OTHER; note = 2-fluororibose adenine
  modified_base 14: mod_base = um
  modified_base 15: mod_base = OTHER; note = 2-fluororibose cytosine
  modified_base 16: mod_base = OTHER; note = 2-O-methylribose adenine
  modified_base 17: mod_base = OTHER; note = 2-fluororibose adenine
  modified_base 18: mod_base = gm
  modified_base 19: mod_base = OTHER; note = 2-fluororibose adenine
  source 1..19: mol_type = other RNA
gactcccactacatcaaga

SEQ ID NO: 588 - RNA, 19 nt, synthetic construct
  misc_feature 1..19: note = Synthetic: WV-42262
  misc_feature 1..19: note = Synthetic: SSR-0104929
  modified_base 1: mod_base = OTHER; note = 2-O-methylribose adenine
  modified_base 2: mod_base = cm
  modified_base 3: mod_base = OTHER; note = 2-fluororibose uracil
  modified_base 4: mod_base = cm
  modified_base 5: mod_base = OTHER; note = 2-fluororibose cytosine
  modified_base 6: mod_base = cm
  modified_base 7: mod_base = OTHER; note = 2-fluororibose adenine
  modified_base 8: mod_base = OTHER; note = 2-fluororibose cytosine
  modified_base 9: mod_base = OTHER; note = 2-fluororibose uracil
  modified_base 10: mod_base = OTHER; note = 2-O-methylribose adenine
  modified_base 11: mod_base = OTHER; note = 2-fluororibose cytosine
  modified_base 12: mod_base = OTHER; note = 2-O-methylribose adenine
  modified_base 13: mod_base = OTHER; note = 2-fluororibose uracil
  modified_base 14: mod_base = cm
  modified_base 15: mod_base = OTHER; note = 2-fluororibose adenine
  modified_base 16: mod_base = OTHER; note = 2-O-methylribose adenine
  modified_base 17: mod_base = OTHER; note = 2-fluororibose guanine
  modified_base 18: mod_base = OTHER; note = 2-O-methylribose adenine
  modified_base 19: mod_base = OTHER; note = 2-fluororibose adenine
  source 1..19: mol_type = other RNA
actcccactacatcaagaa

SEQ ID NO: 589 - RNA, 19 nt, synthetic construct
  misc_feature 1..19: note = Synthetic: WV-42263
  misc_feature 1..19: note = Synthetic: SSR-0104957
  modified_base 1: mod_base = cm
  modified_base 2: mod_base = um
  modified_base 3: mod_base = OTHER; note = 2-fluororibose cytosine
  modified_base 4: mod_base = cm
  modified_base 5: mod_base = OTHER; note = 2-fluororibose cytosine
  modified_base 6: mod_base = OTHER; note = 2-O-methylribose adenine
  modified_base 7: mod_base = OTHER; note = 2-fluororibose cytosine
  modified_base 8: mod_base = OTHER; note = 2-fluororibose uracil
  modified_base 9: mod_base = OTHER; note = 2-fluororibose adenine
  modified_base 10: mod_base = cm
  modified_base 11: mod_base = OTHER; note = 2-fluororibose adenine
  modified_base 12: mod_base = um
  modified_base 13: mod_base = OTHER; note = 2-fluororibose cytosine
  modified_base 14: mod_base = OTHER; note = 2-O-methylribose adenine
  modified_base 15: mod_base = OTHER; note = 2-fluororibose adenine
  modified_base 16: mod_base = gm
  modified_base 17: mod_base = OTHER; note = 2-fluororibose adenine
  modified_base 18: mod_base = cm
  modified_base 19: mod_base = OTHER; note = 2-fluororibose adenine
  source 1..19: mol_type = other RNA
ctcccactacatcaagaca

SEQ ID NO: 590 - RNA, 19 nt, synthetic construct
  misc_feature 1..19: note = Synthetic: WV-42264
  misc_feature 1..19: note = Synthetic: SSR-0105156
  modified_base 1: mod_base = um
  modified_base 2: mod_base = cm
  modified_base 3: mod_base = OTHER; note = 2-fluororibose cytosine
  modified_base 4: mod_base = cm
  modified_base 5: mod_base = OTHER; note = 2-fluororibose adenine
  modified_base 6: mod_base = cm
  modified_base 7: mod_base = OTHER; note = 2-fluororibose uracil
  modified_base 8: mod_base = OTHER; note = 2-fluororibose adenine
  modified_base 9: mod_base = OTHER; note = 2-fluororibose cytosine
  modified_base 10: mod_base = OTHER; note = 2-O-methylribose adenine
  modified_base 11: mod_base = OTHER; note = 2-fluororibose uracil
  modified_base 12: mod_base = cm
  modified_base 13: mod_base = OTHER; note = 2-fluororibose adenine
  modified_base 14: mod_base = OTHER; note = 2-O-methylribose adenine
  modified_base 15: mod_base = OTHER; note = 2-fluororibose guanine
  modified_base 16: mod_base = OTHER; note = 2-O-methylribose adenine
  modified_base 17: mod_base = OTHER; note = 2-fluororibose cytosine
  modified_base 18: mod_base = um
  modified_base 19: mod_base = OTHER; note = 2-fluororibose adenine
  source 1..19: mol_type = other RNA
tcccactacatcaagacta

SEQ ID NO: 591 - RNA, 19 nt, synthetic construct
  misc_feature 1..19: note = Synthetic: WV-42265
  misc_feature 1..19: note = Synthetic: SSR-0104952
  modified_base 1: mod_base = cm
  modified_base 2: mod_base = cm
  modified_base 3: mod_base = OTHER; note = 2-fluororibose adenine
  modified_base 4: mod_base = cm
  modified_base 5: mod_base = OTHER; note = 2-fluororibose uracil
  modified_base 6: mod_base = OTHER; note = 2-O-methylribose adenine
  modified_base 7: mod_base = OTHER; note = 2-fluororibose cytosine
  modified_base 8: mod_base = OTHER; note = 2-fluororibose adenine
  modified_base 9: mod_base = OTHER; note = 2-fluororibose uracil
  modified_base 10: mod_base = cm
  modified_base 11: mod_base = OTHER; note = 2-fluororibose adenine
  modified_base 12: mod_base = OTHER; note = 2-O-methylribose adenine
  modified_base 13: mod_base = OTHER; note = 2-fluororibose guanine
  modified_base 14: mod_base = OTHER; note = 2-O-methylribose adenine
  modified_base 15: mod_base = OTHER; note = 2-fluororibose cytosine
  modified_base 16: mod_base = um
  modified_base 17: mod_base = OTHER; note = 2-fluororibose adenine
  modified_base 18: mod_base = OTHER; note = 2-O-methylribose adenine
  modified_base 19: mod_base = OTHER; note = 2-fluororibose adenine
  source 1..19: mol_type = other RNA
ccactacatcaagactaaa

SEQ ID NO: 592 - RNA, 19 nt, synthetic construct
  misc_feature 1..19: note = Synthetic: WV-42266
  misc_feature 1..19: note = Synthetic: SSR-0104947
  modified_base 1: mod_base = cm
  modified_base 2: mod_base = OTHER; note = 2-O-methylribose adenine
  modified_base 3: mod_base = OTHER; note = 2-fluororibose cytosine
  modified_base 4: mod_base = um
  modified_base 5: mod_base = OTHER; note = 2-fluororibose adenine
  modified_base 6: mod_base = cm
  modified_base 7: mod_base = OTHER; note = 2-fluororibose adenine
  modified_base 8: mod_base = OTHER; note = 2-fluororibose uracil
  modified_base 9: mod_base = OTHER; note = 2-fluororibose cytosine
  modified_base 10: mod_base = OTHER; note = 2-O-methylribose adenine
  modified_base 11: mod_base = OTHER; note = 2-fluororibose adenine
  modified_base 12: mod_base = gm
  modified_base 13: mod_base = OTHER; note = 2-fluororibose adenine
  modified_base 14: mod_base = cm
  modified_base 15: mod_base = OTHER; note = 2-fluororibose uracil
  modified_base 16: mod_base = OTHER; note = 2-O-methylribose adenine
  modified_base 17: mod_base = OTHER; note = 2-fluororibose adenine
  modified_base 18: mod_base = um
  modified_base 19: mod_base = OTHER; note = 2-fluororibose adenine
  source 1..19: mol_type = other RNA
cactacatcaagactaata

SEQ ID NO: 593 - RNA, 19 nt, synthetic construct
  misc_feature 1..19: note = Synthetic: WV-42267
  misc_feature 1..19: note = Synthetic: SSR-0104928
  modified_base 1: mod_base = OTHER; note = 2-O-methylribose adenine
  modified_base 2: mod_base = cm
  modified_base 3: mod_base = OTHER; note = 2-fluororibose uracil
  modified_base 4: mod_base = OTHER; note = 2-O-methylribose adenine
  modified_base 5: mod_base = OTHER; note = 2-fluororibose cytosine
  modified_base 6: mod_base = OTHER; note = 2-O-methylribose adenine
  modified_base 7: mod_base = OTHER; note = 2-fluororibose uracil
  modified_base 8: mod_base = OTHER; note = 2-fluororibose cytosine
  modified_base 9: mod_base = OTHER; note = 2-fluororibose adenine
  modified_base 10: mod_base = OTHER; note = 2-O-methylribose adenine
  modified_base 11: mod_base = OTHER; note = 2-fluororibose guanine
  modified_base 12: mod_base = OTHER; note = 2-O-methylribose adenine
  modified_base 13: mod_base = OTHER; note = 2-fluororibose cytosine
  modified_base 14: mod_base = um
  modified_base 15: mod_base = OTHER; note = 2-fluororibose adenine
  modified_base 16: mod_base = OTHER; note = 2-O-methylribose adenine
  modified_base 17: mod_base = OTHER; note = 2-fluororibose uracil
  modified_base 18: mod_base = cm
  modified_base 19: mod_base = OTHER; note = 2-fluororibose adenine
  source 1..19: mol_type = other RNA
actacatcaagactaatca

SEQ ID NO: 594 - RNA, 19 nt, synthetic construct
  misc_feature 1..19: note = Synthetic: WV-42268
  misc_feature 1..19: note = Synthetic: SSR-0104956
  modified_base 1: mod_base = cm
  modified_base 2: mod_base = um
  modified_base 3: mod_base = OTHER; note = 2-fluororibose adenine
  modified_base 4: mod_base = cm
  modified_base 5: mod_base = OTHER; note = 2-fluororibose adenine
  modified_base 6: mod_base = um
  modified_base 7: mod_base = OTHER; note = 2-fluororibose cytosine
  modified_base 8: mod_base = OTHER; note = 2-fluororibose adenine
  modified_base 9: mod_base = OTHER; note = 2-fluororibose adenine
  modified_base 10: mod_base = gm
  modified_base 11: mod_base = OTHER; note = 2-fluororibose adenine
  modified_base 12: mod_base = cm
  modified_base 13: mod_base = OTHER; note = 2-fluororibose uracil
  modified_base 14: mod_base = OTHER; note = 2-O-methylribose adenine
  modified_base 15: mod_base = OTHER; note = 2-fluororibose adenine
  modified_base 16: mod_base = um
  modified_base 17: mod_base = OTHER; note = 2-fluororibose cytosine
  modified_base 18: mod_base = um
  modified_base 19: mod_base = OTHER; note = 2-fluororibose adenine
  source 1..19: mol_type = other RNA
ctacatcaagactaatcta

SEQ ID NO: 595 - RNA, 19 nt, synthetic construct
  misc_feature 1..19: note = Synthetic: WV-42269
  misc_feature 1..19: note = Synthetic: SSR-0104925
  modified_base 1: mod_base = OTHER; note = 2-O-methylribose adenine
  modified_base 2: mod_base = cm
  modified_base 3: mod_base = OTHER; note = 2-fluororibose adenine
  modified_base 4: mod_base = um
  modified_base 5: mod_base = OTHER; note = 2-fluororibose cytosine
  modified_base 6: mod_base = OTHER; note = 2-O-methylribose adenine
  modified_base 7: mod_base = OTHER; note = 2-fluororibose adenine
  modified_base 8: mod_base = OTHER; note = 2-fluororibose guanine
  modified_base 9: mod_base = OTHER; note = 2-fluororibose adenine
  modified_base 10: mod_base = cm
  modified_base 11: mod_base = OTHER; note = 2-fluororibose uracil
  modified_base 12: mod_base = OTHER; note = 2-O-methylribose adenine
  modified_base 13: mod_base = OTHER; note = 2-fluororibose adenine
  modified_base 14: mod_base = um
  modified_base 15: mod_base = OTHER; note = 2-fluororibose cytosine
  modified_base 16: mod_base = um
  modified_base 17: mod_base = OTHER; note = 2-fluororibose uracil
  modified_base 18: mod_base = gm
  modified_base 19: mod_base = OTHER; note = 2-fluororibose adenine
  source 1..19: mol_type = other RNA
acatcaagactaatcttga

SEQ ID NO: 596 - RNA, 19 nt, synthetic construct
  misc_feature 1..19: note = Synthetic: WV-42270
  misc_feature 1..19: note = Synthetic: SSR-0104948
  modified_base 1: mod_base = cm
  modified_base 2: mod_base = OTHER; note = 2-O-methylribose adenine
  modified_base 3: mod_base = OTHER; note = 2-fluororibose uracil
  modified_base 4: mod_base = cm
  modified_base 5: mod_base = OTHER; note = 2-fluororibose adenine
  modified_base 6: mod_base = OTHER; note = 2-O-methylribose adenine
  modified_base 7: mod_base = OTHER; note = 2-fluororibose guanine
  modified_base 8: mod_base = OTHER; note = 2-fluororibose adenine
  modified_base 9: mod_base = OTHER; note = 2-fluororibose cytosine
  modified_base 10: mod_base = um
  modified_base 11: mod_base = OTHER; note = 2-fluororibose adenine
  modified_base 12: mod_base = OTHER; note = 2-O-methylribose adenine
  modified_base 13: mod_base = OTHER; note = 2-fluororibose uracil
  modified_base 14: mod_base = cm
  modified_base 15: mod_base = OTHER; note = 2-fluororibose uracil
  modified_base 16: mod_base = um
  modified_base 17: mod_base = OTHER; note = 2-fluororibose guanine
  modified_base 18: mod_base = um
  modified_base 19: mod_base = OTHER; note = 2-fluororibose adenine
  source 1..19: mol_type = other RNA
catcaagactaatcttgta

SEQ ID NO: 597 - RNA, 19 nt, synthetic construct
  misc_feature 1..19: note = Synthetic: WV-42271
  misc_feature 1..19: note = Synthetic: SSR-0105167
  modified_base 1: mod_base = um
  modified_base 2: mod_base = gm
  modified_base 3: mod_base = OTHER; note = 2-fluororibose uracil
  modified_base 4: mod_base = gm
  modified_base 5: mod_base = OTHER; note = 2-fluororibose uracil
  modified_base 6: mod_base = gm
  modified_base 7: mod_base = OTHER; note = 2-fluororibose uracil
  modified_base 8: mod_base = OTHER; note = 2-fluororibose uracil
  modified_base 9: mod_base = OTHER; note = 2-fluororibose uracil
  modified_base 10: mod_base = um
  modified_base 11: mod_base = OTHER; note = 2-fluororibose uracil
  modified_base 12: mod_base = cm
  modified_base 13: mod_base = OTHER; note = 2-fluororibose adenine
  modified_base 14: mod_base = cm
  modified_base 15: mod_base = OTHER; note = 2-fluororibose adenine
  modified_base 16: mod_base = um
  modified_base 17: mod_base = OTHER; note = 2-fluororibose guanine
  modified_base 18: mod_base = um
  modified_base 19: mod_base = OTHER; note = 2-fluororibose adenine
  source 1..19: mol_type = other RNA
tgtgtgtttttcacatgta

SEQ ID NO: 598 - RNA, 19 nt, synthetic construct
  misc_feature 1..19: note = Synthetic: WV-42272
  misc_feature 1..19: note = Synthetic: SSR-0105168
  modified_base 1: mod_base = um
  modified_base 2: mod_base = gm
  modified_base 3: mod_base = OTHER; note = 2-fluororibose uracil
  modified_base 4: mod_base = gm
  modified_base 5: mod_base = OTHER; note = 2-fluororibose uracil
  modified_base 6: mod_base = um
  modified_base 7: mod_base = OTHER; note = 2-fluororibose uracil
  modified_base 8: mod_base = OTHER; note = 2-fluororibose uracil
  modified_base 9: mod_base = OTHER; note = 2-fluororibose uracil
  modified_base 10: mod_base = cm
  modified_base 11: mod_base = OTHER; note = 2-fluororibose adenine
  modified_base 12: mod_base = cm
  modified_base 13: mod_base = OTHER; note = 2-fluororibose adenine
  modified_base 14: mod_base = um
  modified_base 15: mod_base = OTHER; note = 2-fluororibose guanine
  modified_base 16: mod_base = um
  modified_base 17: mod_base = OTHER; note = 2-fluororibose adenine
  modified_base 18: mod_base = um
  modified_base 19: mod_base = OTHER; note = 2-fluororibose adenine
  source 1..19: mol_type = other RNA
tgtgtttttcacatgtata

SEQ ID NO: 599 - RNA, 19 nt, synthetic construct
  misc_feature 1..19: note = Synthetic: WV-42273
  misc_feature 1..19: note = Synthetic: SSR-0104970
  modified_base 1: mod_base = gm
  modified_base 2: mod_base = um
  modified_base 3: mod_base = OTHER; note = 2-fluororibose guanine
  modified_base 4: mod_base = um
  modified_base 5: mod_base = OTHER; note = 2-fluororibose uracil
  modified_base 6: mod_base = um
  modified_base 7: mod_base = OTHER; note = 2-fluororibose uracil
  modified_base 8: mod_base = OTHER; note = 2-fluororibose uracil
  modified_base 9: mod_base = OTHER; note = 2-fluororibose cytosine
  modified_base 10: mod_base = OTHER; note = 2-O-methylribose adenine
  modified_base 11: mod_base = OTHER; note = 2-fluororibose cytosine
  modified_base 12: mod_base = OTHER; note = 2-O-methylribose adenine
  modified_base 13: mod_base = OTHER; note = 2-fluororibose uracil
  modified_base 14: mod_base = gm
  modified_base 15: mod_base = OTHER; note = 2-fluororibose uracil
  modified_base 16: mod_base = OTHER; note = 2-O-methylribose adenine
  modified_base 17: mod_base = OTHER; note = 2-fluororibose uracil
  modified_base 18: mod_base = um
  modified_base 19: mod_base = OTHER; note = 2-fluororibose adenine
  source 1..19: mol_type = other RNA
gtgtttttcacatgtatta

SEQ ID NO: 600 - RNA, 19 nt, synthetic construct
  misc_feature 1..19: note = Synthetic: WV-42274
  misc_feature 1..19: note = Synthetic: SSR-0104971
  modified_base 1: mod_base = gm
  modified_base 2: mod_base = um
  modified_base 3: mod_base = OTHER; note = 2-fluororibose uracil
  modified_base 4: mod_base = um
  modified_base 5: mod_base = OTHER; note = 2-fluororibose uracil
  modified_base 6: mod_base = um
  modified_base 7: mod_base = OTHER; note = 2-fluororibose cytosine
  modified_base 8: mod_base = OTHER; note = 2-fluororibose adenine
  modified_base 9: mod_base = OTHER; note = 2-fluororibose cytosine
  modified_base 10: mod_base = OTHER; note = 2-O-methylribose adenine
  modified_base 11: mod_base = OTHER; note = 2-fluororibose uracil
  modified_base 12: mod_base = gm
  modified_base 13: mod_base = OTHER; note = 2-fluororibose uracil
  modified_base 14: mod_base = OTHER; note = 2-O-methylribose adenine
  modified_base 15: mod_base = OTHER; note = 2-fluororibose uracil
  modified_base 16: mod_base = um
  modified_base 17: mod_base = OTHER; note = 2-fluororibose adenine
  modified_base 18: mod_base = um
  modified_base 19: mod_base = OTHER; note = 2-fluororibose adenine
  source 1..19: mol_type = other RNA
gtttttcacatgtattata

SEQ ID NO: 601 - RNA, 19 nt, synthetic construct
  misc_feature 1..19: note = Synthetic: WV-42275
  misc_feature 1..19: note = Synthetic: SSR-0105174
  modified_base 1: mod_base = um
  modified_base 2: mod_base = um
  modified_base 3: mod_base = OTHER; note = 2-fluororibose uracil
  modified_base 4: mod_base = um
  modified_base 5: mod_base = OTHER; note = 2-fluororibose cytosine
  modified_base 6: mod_base = OTHER; note = 2-O-methylribose adenine
  modified_base 7: mod_base = OTHER; note = 2-fluororibose cytosine
  modified_base 8: mod_base = OTHER; note = 2-fluororibose adenine
  modified_base 9: mod_base = OTHER; note = 2-fluororibose uracil
  modified_base 10: mod_base = gm
  modified_base 11: mod_base = OTHER; note = 2-fluororibose uracil
  modified_base 12: mod_base = OTHER; note = 2-O-methylribose adenine
  modified_base 13: mod_base = OTHER; note = 2-fluororibose uracil
  modified_base 14: mod_base = um
  modified_base 15: mod_base = OTHER; note = 2-fluororibose adenine
  modified_base 16: mod_base = um
  modified_base 17: mod_base = OTHER; note = 2-fluororibose adenine
  modified_base 18: mod_base = gm
  modified_base 19: mod_base = OTHER; note = 2-fluororibose adenine
  source 1..19: mol_type = other RNA
ttttcacatgtattataga

SEQ ID NO: 602 - RNA, 19 nt, synthetic construct
  misc_feature 1..19: note = Synthetic: WV-42276
  misc_feature 1..19: note = Synthetic: SSR-0105171
  modified_base 1: mod_base = um
  modified_base 2: mod_base = um
  modified_base 3: mod_base = OTHER; note = 2-fluororibose uracil
  modified_base 4: mod_base = cm
  modified_base 5: mod_base = OTHER; note = 2-fluororibose adenine
  modified_base 6: mod_base = cm
  modified_base 7: mod_base = OTHER; note = 2-fluororibose adenine
  modified_base 8: mod_base = OTHER; note = 2-fluororibose uracil
  modified_base 9: mod_base = OTHER; note = 2-fluororibose guanine
  modified_base 10: mod_base = um
  modified_base 11: mod_base = OTHER; note = 2-fluororibose adenine
  modified_base 12: mod_base = um
  modified_base 13: mod_base = OTHER; note = 2-fluororibose uracil
  modified_base 14: mod_base = OTHER; note = 2-O-methylribose adenine
  modified_base 15: mod_base = OTHER; note = 2-fluororibose uracil
  modified_base 16: mod_base = OTHER; note = 2-O-methylribose adenine
  modified_base 17: mod_base = OTHER; note = 2-fluororibose guanine
  modified_base 18: mod_base = OTHER; note = 2-O-methylribose adenine
  modified_base 19: mod_base = OTHER; note = 2-fluororibose adenine
  source 1..19: mol_type = other RNA
tttcacatgtattatagaa

SEQ ID NO: 603 - RNA, 19 nt, synthetic construct
  misc_feature 1..19: note = Synthetic: WV-42277
  misc_feature 1..19: note = Synthetic: SSR-0104926
  modified_base 1: mod_base = OTHER; note = 2-O-methylribose adenine
  modified_base 2: mod_base = cm
  modified_base 3: mod_base = OTHER; note = 2-fluororibose adenine
  modified_base 4: mod_base = um
  modified_base 5: mod_base = OTHER; note = 2-fluororibose guanine
  modified_base 6: mod_base = um
  modified_base 7: mod_base = OTHER; note = 2-fluororibose adenine
  modified_base 8: mod_base = OTHER; note = 2-fluororibose uracil
  modified_base 9: mod_base = OTHER; note = 2-fluororibose uracil
  modified_base 10: mod_base = OTHER; note = 2-O-methylribose adenine
  modified_base 11: mod_base = OTHER; note = 2-fluororibose uracil
  modified_base 12: mod_base = OTHER; note = 2-O-methylribose adenine
  modified_base 13: mod_base = OTHER; note = 2-fluororibose guanine
  modified_base 14: mod_base = OTHER; note = 2-O-methylribose adenine
  modified_base 15: mod_base = OTHER; note = 2-fluororibose adenine
  modified_base 16: mod_base = um
  modified_base 17: mod_base = OTHER; note = 2-fluororibose guanine
  modified_base 18: mod_base = cm
  modified_base 19: mod_base = OTHER; note = 2-fluororibose adenine
  source 1..19: mol_type = other RNA
acatgtattatagaatgca

SEQ ID NO: 604 - RNA, 19 nt, synthetic construct
  misc_feature 1..19: note = Synthetic: WV-42278
  misc_feature 1..19: note = Synthetic: SSR-0104940
  modified_base 1: mod_base = OTHER; note = 2-O-methylribose adenine
  modified_base 2: mod_base = um
  modified_base 3: mod_base = OTHER; note = 2-fluororibose guanine
  modified_base 4: mod_base = um
  modified_base 5: mod_base = OTHER; note = 2-fluororibose adenine
  modified_base 6: mod_base = um
  modified_base 7: mod_base = OTHER; note = 2-fluororibose uracil
  modified_base 8: mod_base = OTHER; note = 2-fluororibose adenine
  modified_base 9: mod_base = OTHER; note = 2-fluororibose uracil
  modified_base 10: mod_base = OTHER; note = 2-O-methylribose adenine
  modified_base 11: mod_base = OTHER; note = 2-fluororibose guanine
  modified_base 12: mod_base = OTHER; note = 2-O-methylribose adenine
  modified_base 13: mod_base = OTHER; note = 2-fluororibose adenine
  modified_base 14: mod_base = um
  modified_base 15: mod_base = OTHER; note = 2-fluororibose guanine
  modified_base 16: mod_base = cm
  modified_base 17: mod_base = OTHER; note = 2-fluororibose uracil
  modified_base 18: mod_base = um
  modified_base 19: mod_base = OTHER; note = 2-fluororibose adenine
  source 1..19: mol_type = other RNA
atgtattatagaatgctta

SEQ ID NO: 605 - RNA, 19 nt, synthetic construct
  misc_feature 1..19: note = Synthetic: WV-42279
  misc_feature 1..19: note = Synthetic: SSR-0105155
  modified_base 1: mod_base = um
  modified_base 2: mod_base = OTHER; note = 2-O-methylribose adenine
  modified_base 3: mod_base = OTHER; note = 2-fluororibose uracil
  modified_base 4: mod_base = um
  modified_base 5: mod_base = OTHER; note = 2-fluororibose adenine
  modified_base 6: mod_base = um
  modified_base 7: mod_base = OTHER; note = 2-fluororibose adenine
  modified_base 8: mod_base = OTHER; note = 2-fluororibose guanine
  modified_base 9: mod_base = OTHER; note = 2-fluororibose adenine
  modified_base 10: mod_base = OTHER; note = 2-O-methylribose adenine
  modified_base 11: mod_base = OTHER; note = 2-fluororibose uracil
  modified_base 12: mod_base = gm
  modified_base 13: mod_base = OTHER; note = 2-fluororibose cytosine
  modified_base 14: mod_base = um
  modified_base 15: mod_base = OTHER; note = 2-fluororibose uracil
  modified_base 16: mod_base = um
  modified_base 17: mod_base = OTHER; note = 2-fluororibose uracil
  modified_base 18: mod_base = gm
  modified_base 19: mod_base = OTHER; note = 2-fluororibose adenine
  source 1..19: mol_type = other RNA
tattatagaatgcttttga

SEQ ID NO: 606 - RNA, 19 nt, synthetic construct
  misc_feature 1..19: note = Synthetic: WV-42280
  misc_feature 1..19: note = Synthetic: SSR-0105151
  modified_base 1: mod_base = um
  modified_base 2: mod_base = OTHER; note = 2-O-methylribose adenine
  modified_base 3: mod_base = OTHER; note = 2-fluororibose uracil
  modified_base 4: mod_base = OTHER; note = 2-O-methylribose adenine
  modified_base 5: mod_base = OTHER; note = 2-fluororibose guanine
  modified_base 6: mod_base = OTHER; note = 2-O-methylribose adenine
  modified_base 7: mod_base = OTHER; note = 2-fluororibose adenine
  modified_base 8: mod_base = OTHER; note = 2-fluororibose uracil
  modified_base 9: mod_base = OTHER; note = 2-fluororibose guanine
  modified_base 10: mod_base = cm
  modified_base 11: mod_base = OTHER; note = 2-fluororibose uracil
  modified_base 12: mod_base = um
  modified_base 13: mod_base = OTHER; note = 2-fluororibose uracil
  modified_base 14: mod_base = um
  modified_base 15: mod_base = OTHER; note = 2-fluororibose guanine
  modified_base 16: mod_base = cm
  modified_base 17: mod_base = OTHER; note = 2-fluororibose adenine
  modified_base 18: mod_base = um
  modified_base 19: mod_base = OTHER; note = 2-fluororibose adenine
  source 1..19: mol_type = other RNA
tatagaatgcttttgcata

SEQ ID NO: 607 - RNA, 19 nt, synthetic construct
  misc_feature 1..19: note = Synthetic: WV-42281
  misc_feature 1..19: note = Synthetic: SSR-0105148
  modified_base 1: mod_base = um
  modified_base 2: mod_base = OTHER; note = 2-O-methylribose adenine
  modified_base 3: mod_base = OTHER; note = 2-fluororibose guanine
  modified_base 4: mod_base = OTHER; note = 2-O-methylribose adenine
  modified_base 5: mod_base = OTHER; note = 2-fluororibose adenine
  modified_base 6: mod_base = um
  modified_base 7: mod_base = OTHER; note = 2-fluororibose guanine
  modified_base 8: mod_base = OTHER; note = 2-fluororibose cytosine
  modified_base 9: mod_base = OTHER; note = 2-fluororibose uracil
  modified_base 10: mod_base = um
  modified_base 11: mod_base = OTHER; note = 2-fluororibose uracil
  modified_base 12: mod_base = um
  modified_base 13: mod_base = OTHER; note = 2-fluororibose guanine
  modified_base 14: mod_base = cm
  modified_base 15: mod_base = OTHER; note = 2-fluororibose adenine
  modified_base 16: mod_base = um
  modified_base 17: mod_base = OTHER; note = 2-fluororibose guanine
  modified_base 18: mod_base = gm
  modified_base 19: mod_base = OTHER; note = 2-fluororibose adenine
  source 1..19: mol_type = other RNA
tagaatgcttttgcatgga

SEQ ID NO: 608 - RNA, 19 nt, synthetic construct
  misc_feature 1..19: note = Synthetic: WV-42282
  misc_feature 1..19: note = Synthetic: SSR-0104931
  modified_base 1: mod_base = OTHER; note = 2-O-methylribose adenine
  modified_base 2: mod_base = gm
  modified_base 3: mod_base = OTHER; note = 2-fluororibose adenine
  modified_base 4: mod_base = OTHER; note = 2-O-methylribose adenine
  modified_base 5: mod_base = OTHER; note = 2-fluororibose uracil
  modified_base 6: mod_base = gm
  modified_base 7: mod_base = OTHER; note = 2-fluororibose cytosine
  modified_base 8: mod_base = OTHER; note = 2-fluororibose uracil
  modified_base 9: mod_base = OTHER; note = 2-fluororibose uracil
  modified_base 10: mod_base = um
  modified_base 11: mod_base = OTHER; note = 2-fluororibose uracil
  modified_base 12: mod_base = gm
  modified_base 13: mod_base = OTHER; note = 2-fluororibose cytosine
  modified_base 14: mod_base = OTHER; note = 2-O-methylribose adenine
  modified_base 15: mod_base = OTHER; note = 2-fluororibose uracil
  modified_base 16: mod_base = gm
  modified_base 17: mod_base = OTHER; note = 2-fluororibose guanine
  modified_base 18: mod_base = OTHER; note = 2-O-methylribose adenine
  modified_base 19: mod_base = OTHER; note = 2-fluororibose adenine
  source 1..19: mol_type = other RNA
agaatgcttttgcatggaa

SEQ ID NO: 609 - RNA, 19 nt, synthetic construct
  misc_feature 1..19: note = Synthetic: WV-42283
  misc_feature 1..19: note = Synthetic: SSR-0104961
  modified_base 1: mod_base = gm
  modified_base 2: mod_base = OTHER; note = 2-O-methylribose adenine
  modified_base 3: mod_base = OTHER; note = 2-fluororibose adenine
  modified_base 4: mod_base = um
  modified_base 5: mod_base = OTHER; note = 2-fluororibose guanine
  modified_base 6: mod_base = cm
  modified_base 7: mod_base = OTHER; note = 2-fluororibose uracil
  modified_base 8: mod_base = OTHER; note = 2-fluororibose uracil
  modified_base 9: mod_base = OTHER; note = 2-fluororibose uracil
  modified_base 10: mod_base = um
  modified_base 11: mod_base = OTHER; note = 2-fluororibose guanine
  modified_base 12: mod_base = cm
  modified_base 13: mod_base = OTHER; note = 2-fluororibose adenine
  modified_base 14: mod_base = um
  modified_base 15: mod_base = OTHER; note = 2-fluororibose guanine
  modified_base 16: mod_base = gm
  modified_base 17: mod_base = OTHER; note = 2-fluororibose adenine
  modified_base 18: mod_base = cm
  modified_base 19: mod_base = OTHER; note = 2-fluororibose adenine
  source 1..19: mol_type = other RNA
gaatgcttttgcatggaca

SEQ ID NO: 610 - RNA, 19 nt, synthetic construct
  misc_feature 1..19: note = Synthetic: WV-42284
  misc_feature 1..19: note = Synthetic: SSR-0104923
  modified_base 1: mod_base = OTHER; note = 2-O-methylribose adenine
  modified_base 2: mod_base = OTHER; note = 2-O-methylribose adenine
  modified_base 3: mod_base = OTHER; note = 2-fluororibose uracil
  modified_base 4: mod_base = gm
  modified_base 5: mod_base = OTHER; note = 2-fluororibose cytosine
  modified_base 6: mod_base = um
  modified_base 7: mod_base = OTHER; note = 2-fluororibose uracil
  modified_base 8: mod_base = OTHER; note = 2-fluororibose uracil
  modified_base 9: mod_base = OTHER; note = 2-fluororibose uracil
  modified_base 10: mod_base = gm
  modified_base 11: mod_base = OTHER; note = 2-fluororibose cytosine
  modified_base 12: mod_base = OTHER; note = 2-O-methylribose adenine
  modified_base 13: mod_base = OTHER; note = 2-fluororibose uracil
  modified_base 14: mod_base = gm
  modified_base 15: mod_base = OTHER; note = 2-fluororibose guanine
  modified_base 16: mod_base = OTHER; note = 2-O-methylribose adenine
  modified_base 17: mod_base = OTHER; note = 2-fluororibose cytosine
  modified_base 18: mod_base = um
  modified_base 19: mod_base = OTHER; note = 2-fluororibose adenine
  source 1..19: mol_type = other RNA
aatgcttttgcatggacta

SEQ ID NO: 611 - RNA, 19 nt, synthetic construct
  misc_feature 1..19: note = Synthetic: WV-42285
  misc_feature 1..19: note = Synthetic: SSR-0104938
  modified_base 1: mod_base = OTHER; note = 2-O-methylribose adenine
  modified_base 2: mod_base = um
  modified_base 3: mod_base = OTHER; note = 2-fluororibose guanine
  modified_base 4: mod_base = cm
  modified_base 5: mod_base = OTHER; note = 2-fluororibose uracil
  modified_base 6: mod_base = um
  modified_base 7: mod_base = OTHER; note = 2-fluororibose uracil
  modified_base 8: mod_base = OTHER; note = 2-fluororibose uracil
  modified_base 9: mod_base = OTHER; note = 2-fluororibose guanine
  modified_base 10: mod_base = cm
  modified_base 11: mod_base = OTHER; note = 2-fluororibose adenine
  modified_base 12: mod_base = um
  modified_base 13: mod_base = OTHER; note = 2-fluororibose guanine
  modified_base 14: mod_base = gm
  modified_base 15: mod_base = OTHER; note = 2-fluororibose adenine
  modified_base 16: mod_base = cm
  modified_base 17: mod_base = OTHER; note = 2-fluororibose uracil
  modified_base 18: mod_base = OTHER; note = 2-O-methylribose adenine
  modified_base 19: mod_base = OTHER; note = 2-fluororibose adenine
  source 1..19: mol_type = other RNA
atgcttttgcatggactaa

SEQ ID NO: 612 - RNA, 19 nt, synthetic construct
  misc_feature 1..19: note = Synthetic: WV-42286
  misc_feature 1..19: note = Synthetic: SSR-0104966
  modified_base 1: mod_base = gm
  modified_base 2: mod_base = cm
  modified_base 3: mod_base = OTHER; note = 2-fluororibose uracil
  modified_base 4: mod_base = um
  modified_base 5: mod_base = OTHER; note = 2-fluororibose uracil
  modified_base 6: mod_base = um
  modified_base 7: mod_base = OTHER; note = 2-fluororibose guanine
  modified_base 8: mod_base = OTHER; note = 2-fluororibose cytosine
  modified_base 9: mod_base = OTHER; note = 2-fluororibose adenine
  modified_base 10: mod_base = um
  modified_base 11: mod_base = OTHER; note = 2-fluororibose guanine
  modified_base 12: mod_base = gm
  modified_base 13: mod_base = OTHER; note = 2-fluororibose adenine
  modified_base 14: mod_base = cm
  modified_base 15: mod_base = OTHER; note = 2-fluororibose uracil
  modified_base 16: mod_base = OTHER; note = 2-O-methylribose adenine
  modified_base 17: mod_base = OTHER; note = 2-fluororibose uracil
  modified_base 18: mod_base = cm
  modified_base 19: mod_base = OTHER; note = 2-fluororibose adenine
  source 1..19: mol_type = other RNA
gcttttgcatggactatca

SEQ ID NO: 613 - RNA, 19 nt, synthetic construct
  misc_feature 1..19: note = Synthetic: WV-42287
  misc_feature 1..19: note = Synthetic: SSR-0104959
  modified_base 1: mod_base = cm
  modified_base 2: mod_base = um
  modified_base 3: mod_base = OTHER; note = 2-fluororibose uracil
  modified_base 4: mod_base = um
  modified_base 5: mod_base = OTHER; note = 2-fluororibose uracil
  modified_base 6: mod_base = gm
  modified_base 7: mod_base = OTHER; note = 2-fluororibose cytosine
  modified_base 8: mod_base = OTHER; note = 2-fluororibose adenine
  modified_base 9: mod_base = OTHER; note = 2-fluororibose uracil
  modified_base 10: mod_base = gm
  modified_base 11: mod_base = OTHER; note = 2-fluororibose guanine
  modified_base 12: mod_base = OTHER; note = 2-O-methylribose adenine
  modified_base 13: mod_base = OTHER; note = 2-fluororibose cytosine
  modified_base 14: mod_base = um
  modified_base 15: mod_base = OTHER; note = 2-fluororibose adenine
  modified_base 16: mod_base = um
  modified_base 17: mod_base = OTHER; note = 2-fluororibose cytosine
  modified_base 18: mod_base = cm
  modified_base 19: mod_base = OTHER; note = 2-fluororibose adenine
  source 1..19: mol_type = other RNA
cttttgcatggactatcca

SEQ ID NO: 614 - RNA, 19 nt, synthetic construct
  misc_feature 1..19: note = Synthetic: WV-42288
  misc_feature 1..19: note = Synthetic: SSR-0105175
  modified_base 1: mod_base = um
  modified_base 2: mod_base = um
  modified_base 3: mod_base = OTHER; note = 2-fluororibose uracil
  modified_base 4: mod_base = um
  modified_base 5: mod_base = OTHER; note = 2-fluororibose guanine
  modified_base 6: mod_base = cm
  modified_base 7: mod_base = OTHER; note = 2-fluororibose adenine
  modified_base 8: mod_base = OTHER; note = 2-fluororibose uracil
  modified_base 9: mod_base = OTHER; note = 2-fluororibose guanine
  modified_base 10: mod_base = gm
  modified_base 11: mod_base = OTHER; note = 2-fluororibose adenine
  modified_base 12: mod_base = cm
  modified_base 13: mod_base = OTHER; note = 2-fluororibose uracil
  modified_base 14: mod_base = OTHER; note = 2-O-methylribose adenine
  modified_base 15: mod_base = OTHER; note = 2-fluororibose uracil
  modified_base 16: mod_base = cm
  modified_base 17: mod_base = OTHER; note = 2-fluororibose cytosine
  modified_base 18: mod_base = um
  modified_base 19: mod_base = OTHER; note = 2-fluororibose adenine
  source 1..19: mol_type = other RNA
ttttgcatggactatccta

SEQ ID NO: 615 - RNA, 19 nt, synthetic construct
  misc_feature 1..19: note = Synthetic: WV-42289
  misc_feature 1..19: note = Synthetic: SSR-0105170
  modified_base 1: mod_base = um
  modified_base 2: mod_base = um
  modified_base 3: mod_base = OTHER; note = 2-fluororibose guanine
  modified_base 4: mod_base = cm
  modified_base 5: mod_base = OTHER; note = 2-fluororibose adenine
  modified_base 6: mod_base = um
  modified_base 7: mod_base = OTHER; note = 2-fluororibose guanine
  modified_base 8: mod_base = OTHER; note = 2-fluororibose guanine
  modified_base 9: mod_base = OTHER; note = 2-fluororibose adenine
  modified_base 10: mod_base = cm
  modified_base 11: mod_base = OTHER; note = 2-fluororibose uracil
  modified_base 12: mod_base = OTHER; note = 2-O-methylribose adenine
  modified_base 13: mod_base = OTHER; note = 2-fluororibose uracil
  modified_base 14: mod_base = cm
  modified_base 15: mod_base = OTHER; note = 2-fluororibose cytosine
  modified_base 16: mod_base = um
  modified_base 17: mod_base = OTHER; note = 2-fluororibose cytosine
  modified_base 18: mod_base = um
  modified_base 19: mod_base = OTHER; note = 2-fluororibose adenine
  source 1..19: mol_type = other RNA
ttgcatggactatcctcta

SEQ ID NO: 616 - RNA, 19 nt, synthetic construct
  misc_feature 1..19: note = Synthetic: WV-42290
  misc_feature 1..19: note = Synthetic: SSR-0105164
  modified_base 1: mod_base = um
  modified_base 2: mod_base = gm
  modified_base 3: mod_base = OTHER; note = 2-fluororibose cytosine
  modified_base 4: mod_base = OTHER; note = 2-O-methylribose adenine
  modified_base 5: mod_base = OTHER; note = 2-fluororibose uracil
  modified_base 6: mod_base = gm
  modified_base 7: mod_base = OTHER; note = 2-fluororibose guanine
  modified_base 8: mod_base = OTHER; note = 2-fluororibose adenine
  modified_base 9: mod_base = OTHER; note = 2-fluororibose cytosine
  modified_base 10: mod_base = um
  modified_base 11: mod_base = OTHER; note = 2-fluororibose adenine
  modified_base 12: mod_base = um
  modified_base 13: mod_base = OTHER; note = 2-fluororibose cytosine
  modified_base 14: mod_base = cm
  modified_base 15: mod_base = OTHER; note = 2-fluororibose uracil
  modified_base 16: mod_base = cm
  modified_base 17: mod_base = OTHER; note = 2-fluororibose uracil
  modified_base 18: mod_base = um
  modified_base 19: mod_base = OTHER; note = 2-fluororibose adenine
  source 1..19: mol_type = other RNA
tgcatggactatcctctta

SEQ ID NO: 617 - RNA, 19 nt, synthetic construct
  misc_feature 1..19: note = Synthetic: WV-42291
  misc_feature 1..19: note = Synthetic: SSR-0104965
  modified_base 1: mod_base = gm
  modified_base 2: mod_base = cm
  modified_base 3: mod_base = OTHER; note = 2-fluororibose adenine
  modified_base 4: mod_base = um
  modified_base 5: mod_base = OTHER; note = 2-fluororibose guanine
  modified_base 6: mod_base = gm
  modified_base 7: mod_base = OTHER; note = 2-fluororibose adenine
  modified_base 8: mod_base = OTHER; note = 2-fluororibose cytosine
  modified_base 9: mod_base = OTHER; note = 2-fluororibose uracil
  modified_base 10: mod_base = OTHER; note = 2-O-methylribose adenine
  modified_base 11: mod_base = OTHER; note = 2-fluororibose uracil
  modified_base 12: mod_base = cm
  modified_base 13: mod_base = OTHER; note = 2-fluororibose cytosine
  modified_base 14: mod_base = um
  modified_base 15: mod_base = OTHER; note = 2-fluororibose cytosine
  modified_base 16: mod_base = um
  modified_base 17: mod_base = OTHER; note = 2-fluororibose uracil
  modified_base 18: mod_base = gm
  modified_base 19: mod_base = OTHER; note = 2-fluororibose adenine
  source 1..19: mol_type = other RNA
gcatggactatcctcttga

SEQ ID NO: 618 - RNA, 19 nt, synthetic construct
  misc_feature 1..19: note = Synthetic: WV-42292
  misc_feature 1..19: note = Synthetic: SSR-0104950
  modified_base 1: mod_base = cm
  modified_base 2: mod_base = OTHER; note = 2-O-methylribose adenine
  modified_base 3: mod_base = OTHER; note = 2-fluororibose uracil
  modified_base 4: mod_base = gm
  modified_base 5: mod_base = OTHER; note = 2-fluororibose guanine
  modified_base 6: mod_base = OTHER; note = 2-O-methylribose adenine
  modified_base 7: mod_base = OTHER; note = 2-fluororibose cytosine
  modified_base 8: mod_base = OTHER; note = 2-fluororibose uracil
  modified_base 9: mod_base = OTHER; note = 2-fluororibose adenine
  modified_base 10: mod_base = um
  modified_base 11: mod_base = OTHER; note = 2-fluororibose cytosine
  modified_base 12: mod_base = cm
  modified_base 13: mod_base = OTHER; note = 2-fluororibose uracil
  modified_base 14: mod_base = cm
  modified_base 15: mod_base = OTHER; note = 2-fluororibose uracil
  modified_base 16: mod_base = um
  modified_base 17: mod_base = OTHER; note = 2-fluororibose guanine
  modified_base 18: mod_base = um
  modified_base 19: mod_base = OTHER; note = 2-fluororibose adenine
  source 1..19: mol_type = other RNA
catggactatcctcttgta

SEQ ID NO: 619 - RNA, 19 nt, synthetic construct
  misc_feature 1..19: note = Synthetic: WV-42293
  misc_feature 1..19: note = Synthetic: SSR-0104939
  modified_base 1: mod_base = OTHER; note = 2-O-methylribose adenine
  modified_base 2: mod_base = um
  modified_base 3: mod_base = OTHER; note = 2-fluororibose guanine
  modified_base 4: mod_base = gm
  modified_base 5: mod_base = OTHER; note = 2-fluororibose adenine
  modified_base 6: mod_base = cm
  modified_base 7: mod_base = OTHER; note = 2-fluororibose uracil
  modified_base 8: mod_base = OTHER; note = 2-fluororibose adenine
  modified_base 9: mod_base = OTHER; note = 2-fluororibose uracil
  modified_base 10: mod_base = cm
  modified_base 11: mod_base = OTHER; note = 2-fluororibose cytosine
  modified_base 12: mod_base = um
  modified_base 13: mod_base = OTHER; note = 2-fluororibose cytosine
  modified_base 14: mod_base = um
  modified_base 15: mod_base = OTHER; note = 2-fluororibose uracil
  modified_base 16: mod_base = gm
  modified_base 17: mod_base = OTHER; note = 2-fluororibose uracil
  modified_base 18: mod_base = um
  modified_base 19: mod_base = OTHER; note = 2-fluororibose adenine
  source 1..19: mol_type = other RNA
atggactatcctcttgtta

SEQ ID NO: 620 - RNA, 19 nt, synthetic construct
  misc_feature 1..19: note = Synthetic: WV-42294
  misc_feature 1..19: note = Synthetic: SSR-0105165
  modified_base 1: mod_base = um
  modified_base 2: mod_base = gm
  modified_base 3: mod_base = OTHER; note = 2-fluororibose guanine
  modified_base 4: mod_base = OTHER; note = 2-O-methylribose adenine
  modified_base 5: mod_base = OTHER; note = 2-fluororibose cytosine
  modified_base 6: mod_base = um
  modified_base 7: mod_base = OTHER; note = 2-fluororibose adenine
  modified_base 8: mod_base = OTHER; note = 2-fluororibose uracil
  modified_base 9: mod_base = OTHER; note = 2-fluororibose cytosine
  modified_base 10: mod_base = cm
  modified_base 11: mod_base = OTHER; note = 2-fluororibose uracil
  modified_base 12: mod_base = cm
  modified_base 13: mod_base = OTHER; note = 2-fluororibose uracil
  modified_base 14: mod_base = um
  modified_base 15: mod_base = OTHER; note = 2-fluororibose guanine
  modified_base 16: mod_base = um
  modified_base 17: mod_base = OTHER; note = 2-fluororibose uracil
  modified_base 18: mod_base = um
  modified_base 19: mod_base = OTHER; note = 2-fluororibose adenine
  source 1..19: mol_type = other RNA
tggactatcctcttgttta

SEQ ID NO: 621 - RNA, 19 nt, synthetic construct
  misc_feature 1..19: note = Synthetic: WV-42295
  misc_feature 1..19: note = Synthetic: SSR-0104962
  modified_base 1: mod_base = gm
  modified_base 2: mod_base = OTHER; note = 2-O-methylribose adenine
  modified_base 3: mod_base = OTHER; note = 2-fluororibose cytosine
  modified_base 4: mod_base = um
  modified_base 5: mod_base = OTHER; note = 2-fluororibose adenine
  modified_base 6: mod_base = um
  modified_base 7: mod_base = OTHER; note = 2-fluororibose cytosine
  modified_base 8: mod_base = OTHER; note = 2-fluororibose cytosine
  modified_base 9: mod_base = OTHER; note = 2-fluororibose uracil
  modified_base 10: mod_base = cm
  modified_base 11: mod_base = OTHER; note = 2-fluororibose uracil
  modified_base 12: mod_base = um
  modified_base 13: mod_base = OTHER; note = 2-fluororibose guanine
  modified_base 14: mod_base = um
  modified_base 15: mod_base = OTHER; note = 2-fluororibose uracil
  modified_base 16: mod_base = um
  modified_base 17: mod_base = OTHER; note = 2-fluororibose uracil
  modified_base 18: mod_base = um
  modified_base 19: mod_base = OTHER; note = 2-fluororibose adenine
  source 1..19: mol_type = other RNA
gactatcctcttgttttta

SEQ ID NO: 622 - RNA, 19 nt, synthetic construct
  misc_feature 1..19: note = Synthetic: WV-42296
  misc_feature 1..19: note = Synthetic: SSR-0105152
  modified_base 1: mod_base = um
  modified_base 2: mod_base = OTHER; note = 2-O-methylribose adenine
  modified_base 3: mod_base = OTHER; note = 2-fluororibose uracil
  modified_base 4: mod_base = cm
  modified_base 5: mod_base = OTHER; note = 2-fluororibose cytosine
  modified_base 6: mod_base = um
  modified_base 7: mod_base = OTHER; note = 2-fluororibose cytosine
  modified_base 8: mod_base = OTHER; note = 2-fluororibose uracil
  modified_base 9: mod_base = OTHER; note = 2-fluororibose uracil
  modified_base 10: mod_base = gm
  modified_base 11: mod_base = OTHER; note = 2-fluororibose uracil
  modified_base 12: mod_base = um
  modified_base 13: mod_base = OTHER; note = 2-fluororibose uracil
  modified_base 14: mod_base = um
  modified_base 15: mod_base = OTHER; note = 2-fluororibose uracil
  modified_base 16: mod_base = OTHER; note = 2-O-methylribose adenine
  modified_base 17: mod_base = OTHER; note = 2-fluororibose uracil
  modified_base 18: mod_base = um
  modified_base 19: mod_base = OTHER; note = 2-fluororibose adenine
  source 1..19: mol_type = other RNA
tatcctcttgtttttatta

SEQ ID NO: 623 - RNA, 19 nt, synthetic construct
  misc_feature 1..19: note = Synthetic: WV-42297
  misc_feature 1..19: note = Synthetic: SSR-0104936
  modified_base 1: mod_base = OTHER; note = 2-O-methylribose adenine
  modified_base 2: mod_base = um
  modified_base 3: mod_base = OTHER; note = 2-fluororibose cytosine
  modified_base 4: mod_base = cm
  modified_base 5: mod_base = OTHER; note = 2-fluororibose uracil
  modified_base 6: mod_base = cm
  modified_base 7: mod_base = OTHER; note = 2-fluororibose uracil
  modified_base 8: mod_base = OTHER; note = 2-fluororibose uracil
  modified_base 9: mod_base = OTHER; note = 2-fluororibose guanine
  modified_base 10: mod_base = um
  modified_base 11: mod_base = OTHER; note = 2-fluororibose uracil
  modified_base 12: mod_base = um
  modified_base 13: mod_base = OTHER; note = 2-fluororibose uracil
  modified_base 14: mod_base = um
  modified_base 15: mod_base = OTHER; note = 2-fluororibose adenine
  modified_base 16: mod_base = um
  modified_base 17: mod_base = OTHER; note = 2-fluororibose uracil
  modified_base 18: mod_base = OTHER; note = 2-O-methylribose adenine
  modified_base 19: mod_base = OTHER; note = 2-fluororibose adenine
  source 1..19: mol_type = other RNA
atcctcttgtttttattaa

SEQ ID NO: 624 - RNA, 19 nt, synthetic construct
  misc_feature 1..19: note = Synthetic: WV-42298
  misc_feature 1..19: note = Synthetic: SSR-0105159
  modified_base 1: mod_base = um
  modified_base 2: mod_base = cm
  modified_base 3: mod_base = OTHER; note = 2-fluororibose cytosine
  modified_base 4: mod_base = um
  modified_base 5: mod_base = OTHER; note = 2-fluororibose cytosine
  modified_base 6: mod_base = um
  modified_base 7: mod_base = OTHER; note = 2-fluororibose uracil
  modified_base 8: mod_base = OTHER; note = 2-fluororibose guanine
  modified_base 9: mod_base = OTHER; note = 2-fluororibose uracil
  modified_base 10: mod_base = um
  modified_base 11: mod_base = OTHER; note = 2-fluororibose uracil
  modified_base 12: mod_base = um
  modified_base 13: mod_base = OTHER; note = 2-fluororibose uracil
  modified_base 14: mod_base = OTHER; note = 2-O-methylribose adenine
  modified_base 15: mod_base = OTHER; note = 2-fluororibose uracil
  modified_base 16: mod_base = um
  modified_base 17: mod_base = OTHER; note = 2-fluororibose adenine
  modified_base 18: mod_base = OTHER; note = 2-O-methylribose adenine
  modified_base 19: mod_base = OTHER; note = 2-fluororibose adenine
  source 1..19: mol_type = other RNA
tcctcttgtttttattaaa

SEQ ID NO: 625 - RNA, 19 nt, synthetic construct
  misc_feature 1..19: note = Synthetic: WV-42299
  misc_feature 1..19: note = Synthetic: SSR-0105173
  modified_base 1: mod_base = um
  modified_base 2: mod_base = um
  modified_base 3: mod_base = OTHER; note = 2-fluororibose uracil
  modified_base 4: mod_base = um
  modified_base 5: mod_base = OTHER; note = 2-fluororibose adenine
  modified_base 6: mod_base = um
  modified_base 7: mod_base = OTHER; note = 2-fluororibose uracil
  modified_base 8: mod_base = OTHER; note = 2-fluororibose adenine
  modified_base 9: mod_base = OTHER; note = 2-fluororibose adenine
  modified_base 10: mod_base = OTHER; note = 2-O-methylribose adenine
  modified_base 11: mod_base = OTHER; note = 2-fluororibose adenine
  modified_base 12: mod_base = OTHER; note = 2-O-methylribose adenine
  modified_base 13: mod_base = OTHER; note = 2-fluororibose cytosine
  modified_base 14: mod_base = OTHER; note = 2-O-methylribose adenine
  modified_base 15: mod_base = OTHER; note = 2-fluororibose adenine
  modified_base 16: mod_base = OTHER; note = 2-O-methylribose adenine
  modified_base 17: mod_base = OTHER; note = 2-fluororibose uracil
  modified_base 18: mod_base = gm
  modified_base 19: mod_base = OTHER; note = 2-fluororibose adenine
  source 1..19: mol_type = other RNA
ttttattaaaaacaaatga

SEQ ID NO: 626 - RNA, 19 nt, synthetic construct
  misc_feature 1..19: note = Synthetic: WV-42300
  misc_feature 1..19: note = Synthetic: SSR-0105154
  modified_base 1: mod_base = um
  modified_base 2: mod_base = OTHER; note = 2-O-methylribose adenine
  modified_base 3: mod_base = OTHER; note = 2-fluororibose uracil
  modified_base 4: mod_base = um
  modified_base 5: mod_base = OTHER; note = 2-fluororibose adenine
  modified_base 6: mod_base = OTHER; note = 2-O-methylribose adenine
  modified_base 7: mod_base = OTHER; note = 2-fluororibose adenine
  modified_base 8: mod_base = OTHER; note = 2-fluororibose adenine
  modified_base 9: mod_base = OTHER; note = 2-fluororibose adenine
  modified_base 10: mod_base = cm
  modified_base 11: mod_base = OTHER; note = 2-fluororibose adenine
  modified_base 12: mod_base = OTHER; note = 2-O-methylribose adenine
  modified_base 13: mod_base = OTHER; note = 2-fluororibose adenine
  modified_base 14: mod_base = um
  modified_base 15: mod_base = OTHER; note = 2-fluororibose guanine
  modified_base 16: mod_base = OTHER; note = 2-O-methylribose adenine
  modified_base 17: mod_base = OTHER; note = 2-fluororibose uracil
  modified_base 18: mod_base = um
  modified_base 19: mod_base = OTHER; note = 2-fluororibose adenine
  source 1..19: mol_type = other RNA
tattaaaaacaaatgatta

SEQ ID NO: 627 - RNA, 19 nt, synthetic construct
  misc_feature 1..19: note = Synthetic: WV-42301
  misc_feature 1..19: note = Synthetic: SSR-0104942
  modified_base 1: mod_base = OTHER; note = 2-O-methylribose adenine
  modified_base 2: mod_base = um
  modified_base 3: mod_base = OTHER; note = 2-fluororibose uracil
  modified_base 4: mod_base = OTHER; note = 2-O-methylribose adenine
  modified_base 5: mod_base = OTHER; note = 2-fluororibose adenine
  modified_base 6: mod_base = OTHER; note = 2-O-methylribose adenine
  modified_base 7: mod_base = OTHER; note = 2-fluororibose adenine
  modified_base 8: mod_base = OTHER; note = 2-fluororibose adenine
  modified_base 9: mod_base = OTHER; note = 2-fluororibose cytosine
  modified_base 10: mod_base = OTHER; note = 2-O-methylribose adenine
  modified_base 11: mod_base = OTHER; note = 2-fluororibose adenine
  modified_base 12: mod_base = OTHER; note = 2-O-methylribose adenine
  modified_base 13: mod_base = OTHER; note = 2-fluororibose uracil
  modified_base 14: mod_base = gm
  modified_base 15: mod_base = OTHER; note = 2-fluororibose adenine
  modified_base 16: mod_base = um
  modified_base 17: mod_base = OTHER; note = 2-fluororibose uracil
  modified_base 18: mod_base = um
  modified_base 19: mod_base = OTHER; note = 2-fluororibose adenine
  source 1..19: mol_type = other RNA
attaaaaacaaatgattta

SEQ ID NO: 628 - RNA, 19 nt, synthetic construct
  misc_feature 1..19: note = Synthetic: WV-42302
  misc_feature 1..19: note = Synthetic: SSR-0104913
  modified_base 1: mod_base = OTHER; note = 2-O-methylribose adenine
  modified_base 2: mod_base = OTHER; note = 2-O-methylribose adenine
  modified_base 3: mod_base = OTHER; note = 2-fluororibose adenine
  modified_base 4: mod_base = OTHER; note = 2-O-methylribose adenine
  modified_base 5: mod_base = OTHER; note = 2-fluororibose uracil
  modified_base 6: mod_base = OTHER; note = 2-O-methylribose adenine
  modified_base 7: mod_base = OTHER; note = 2-fluororibose adenine
  modified_base 8: mod_base = OTHER; note = 2-fluororibose cytosine
  modified_base 9: mod_base = OTHER; note = 2-fluororibose cytosine
  modified_base 10: mod_base = um
  modified_base 11: mod_base = OTHER; note = 2-fluororibose cytosine
  modified_base 12: mod_base = um
  modified_base 13: mod_base = OTHER; note = 2-fluororibose uracil
  modified_base 14: mod_base = gm
  modified_base 15: mod_base = OTHER; note = 2-fluororibose uracil
  modified_base 16: mod_base = OTHER; note = 2-O-methylribose adenine
  modified_base 17: mod_base = OTHER; note = 2-fluororibose guanine
  modified_base 18: mod_base = um
  modified_base 19: mod_base = OTHER; note = 2-fluororibose adenine
  source 1..19: mol_type = other RNA
aaaataacctcttgtagta

SEQ ID NO: 629 - RNA, 19 nt, synthetic construct
  misc_feature 1..19: note = Synthetic: WV-42303
  misc_feature 1..19: note = Synthetic: SSR-0104914
  modified_base 1: mod_base = OTHER; note = 2-O-methylribose adenine
  modified_base 2: mod_base = OTHER; note = 2-O-methylribose adenine
  modified_base 3: mod_base = OTHER; note = 2-fluororibose adenine
  modified_base 4: mod_base = um
  modified_base 5: mod_base = OTHER; note = 2-fluororibose adenine
  modified_base 6: mod_base = OTHER; note = 2-O-methylribose adenine
  modified_base 7: mod_base = OTHER; note = 2-fluororibose cytosine
  modified_base 8: mod_base = OTHER; note = 2-fluororibose cytosine
  modified_base 9: mod_base = OTHER; note = 2-fluororibose uracil
  modified_base 10: mod_base = cm
  modified_base 11: mod_base = OTHER; note = 2-fluororibose uracil
  modified_base 12: mod_base = um
  modified_base 13: mod_base = OTHER; note = 2-fluororibose guanine
  modified_base 14: mod_base = um
  modified_base 15: mod_base = OTHER; note = 2-fluororibose adenine
  modified_base 16: mod_base = gm
  modified_base 17: mod_base = OTHER; note = 2-fluororibose uracil
  modified_base 18: mod_base = um
  modified_base 19: mod_base = OTHER; note = 2-fluororibose adenine
  source 1..19: mol_type = other RNA
aaataacctcttgtagtta

SEQ ID NO: 630 - RNA, 19 nt, synthetic construct
  misc_feature 1..19: note = Synthetic: WV-42304
  misc_feature 1..19: note = Synthetic: SSR-0104919
  modified_base 1: mod_base = OTHER; note = 2-O-methylribose adenine
  modified_base 2: mod_base = OTHER; note = 2-O-methylribose adenine
  modified_base 3: mod_base = OTHER; note = 2-fluororibose uracil
  modified_base 4: mod_base = OTHER; note = 2-O-methylribose adenine
  modified_base 5: mod_base = OTHER; note = 2-fluororibose adenine
  modified_base 6: mod_base = cm
  modified_base 7: mod_base = OTHER; note = 2-fluororibose cytosine
  modified_base 8: mod_base = OTHER; note = 2-fluororibose uracil
  modified_base 9: mod_base = OTHER; note = 2-fluororibose cytosine
  modified_base 10: mod_base = um
  modified_base 11: mod_base = OTHER; note = 2-fluororibose uracil
  modified_base 12: mod_base = gm
  modified_base 13: mod_base = OTHER; note = 2-fluororibose uracil
  modified_base 14: mod_base = OTHER; note = 2-O-methylribose adenine
  modified_base 15: mod_base = OTHER; note = 2-fluororibose guanine
  modified_base 16: mod_base = um
  modified_base 17: mod_base = OTHER; note = 2-fluororibose uracil
  modified_base 18: mod_base = OTHER; note = 2-O-methylribose adenine
  modified_base 19: mod_base = OTHER; note = 2-fluororibose adenine
  source 1..19: mol_type = other RNA
aataacctcttgtagttaa

SEQ ID NO: 631 - RNA, 19 nt, synthetic construct
  misc_feature 1..19: note = Synthetic: WV-42305
  misc_feature 1..19: note = Synthetic: SSR-0104934
  modified_base 1: mod_base = OTHER; note = 2-O-methylribose adenine
  modified_base 2: mod_base = um
  modified_base 3: mod_base = OTHER; note = 2-fluororibose adenine
  modified_base 4: mod_base = OTHER; note = 2-O-methylribose adenine
  modified_base 5: mod_base = OTHER; note = 2-fluororibose cytosine
  modified_base 6: mod_base = cm
  modified_base 7: mod_base = OTHER; note = 2-fluororibose uracil
  modified_base 8: mod_base = OTHER; note = 2-fluororibose cytosine
  modified_base 9: mod_base = OTHER; note = 2-fluororibose uracil
  modified_base 10: mod_base = um
  modified_base 11: mod_base = OTHER; note = 2-fluororibose guanine
  modified_base 12: mod_base = um
  modified_base 13: mod_base = OTHER; note = 2-fluororibose adenine
  modified_base 14: mod_base = gm
  modified_base 15: mod_base = OTHER; note = 2-fluororibose uracil
  modified_base 16: mod_base = um
  modified_base 17: mod_base = OTHER; note = 2-fluororibose adenine
  modified_base 18: mod_base = um
  modified_base 19: mod_base = OTHER; note = 2-fluororibose adenine
  source 1..19: mol_type = other RNA
ataacctcttgtagttata

SEQ ID NO: 632 - RNA, 19 nt, synthetic construct
  misc_feature 1..19: note = Synthetic: WV-42306
  misc_feature 1..19: note = Synthetic: SSR-0105146
  modified_base 1: mod_base = um
  modified_base 2: mod_base = OTHER; note = 2-O-methylribose adenine
  modified_base 3: mod_base = OTHER; note = 2-fluororibose adenine
  modified_base 4: mod_base = cm
  modified_base 5: mod_base = OTHER; note = 2-fluororibose cytosine
  modified_base 6: mod_base = um
  modified_base 7: mod_base = OTHER; note = 2-fluororibose cytosine
  modified_base 8: mod_base = OTHER; note = 2-fluororibose uracil
  modified_base 9: mod_base = OTHER; note = 2-fluororibose uracil
  modified_base 10: mod_base = gm
  modified_base 11: mod_base = OTHER; note = 2-fluororibose uracil
  modified_base 12: mod_base = OTHER; note = 2-O-methylribose adenine
  modified_base 13: mod_base = OTHER; note = 2-fluororibose guanine
  modified_base 14: mod_base = um
  modified_base 15: mod_base = OTHER; note = 2-fluororibose uracil
  modified_base 16: mod_base = OTHER; note = 2-O-methylribose adenine
  modified_base 17: mod_base = OTHER; note = 2-fluororibose uracil
  modified_base 18: mod_base = OTHER; note = 2-O-methylribose adenine
  modified_base 19: mod_base = OTHER; note = 2-fluororibose adenine
  source 1..19: mol_type = other RNA
taacctcttgtagttataa

SEQ ID NO: 633 - RNA, 19 nt, synthetic construct
  misc_feature 1..19: note = Synthetic: WV-42307
  misc_feature 1..19: note = Synthetic: SSR-0104916
  modified_base 1: mod_base = OTHER; note = 2-O-methylribose adenine
  modified_base 2: mod_base = OTHER; note = 2-O-methylribose adenine
  modified_base 3: mod_base = OTHER; note = 2-fluororibose cytosine
  modified_base 4: mod_base = cm
  modified_base 5: mod_base = OTHER; note = 2-fluororibose uracil
  modified_base 6: mod_base = cm
  modified_base 7: mod_base = OTHER; note = 2-fluororibose uracil
  modified_base 8: mod_base = OTHER; note = 2-fluororibose uracil
  modified_base 9: mod_base = OTHER; note = 2-fluororibose guanine
  modified_base 10: mod_base = um
  modified_base 11: mod_base = OTHER; note = 2-fluororibose adenine
  modified_base 12: mod_base = gm
  modified_base 13: mod_base = OTHER; note = 2-fluororibose uracil
  modified_base 14: mod_base = um
  modified_base 15: mod_base = OTHER; note = 2-fluororibose adenine
  modified_base 16: mod_base = um
  modified_base 17: mod_base = OTHER; note = 2-fluororibose adenine
  modified_base 18: mod_base = OTHER; note = 2-O-methylribose adenine
  modified_base 19: mod_base = OTHER; note = 2-fluororibose adenine
  source 1..19: mol_type = other RNA
aacctcttgtagttataaa

SEQ ID NO: 634 - RNA, 19 nt, synthetic construct
  misc_feature 1..19: note = Synthetic: WV-42308
  misc_feature 1..19: note = Synthetic: SSR-0104933
  modified_base 1: mod_base = OTHER; note = 2-O-methylribose adenine
  modified_base 2: mod_base = gm
  modified_base 3: mod_base = OTHER; note = 2-fluororibose uracil
  modified_base 4: mod_base = um
  modified_base 5: mod_base = OTHER; note = 2-fluororibose adenine
  modified_base 6: mod_base = um
  modified_base 7: mod_base = OTHER; note = 2-fluororibose adenine
  modified_base 8: mod_base = OTHER; note = 2-fluororibose adenine
  modified_base 9: mod_base = OTHER; note = 2-fluororibose adenine
  modified_base 10: mod_base = OTHER; note = 2-O-methylribose adenine
  modified_base 11: mod_base = OTHER; note = 2-fluororibose uracil
  modified_base 12: mod_base = OTHER; note = 2-O-methylribose adenine
  modified_base 13: mod_base = OTHER; note = 2-fluororibose adenine
  modified_base 14: mod_base = OTHER; note = 2-O-methylribose adenine
  modified_base 15: mod_base = OTHER; note = 2-fluororibose adenine
  modified_base 16: mod_base = cm
  modified_base 17: mod_base = OTHER; note = 2-fluororibose guanine
  modified_base 18: mod_base = um
  modified_base 19: mod_base = OTHER; note = 2-fluororibose adenine
  source 1..19: mol_type = other RNA
agttataaaataaaacgta

SEQ ID NO: 635 - RNA, 23 nt, synthetic construct
  misc_feature 1..23: note = Synthetic: WV-42354
  misc_feature 1..23: note = Synthetic: SSR-0105110
  modified_base 1: mod_base = um
  modified_base 1..2: mod_base = OTHER; note = phosphorothioate
  modified_base 2: mod_base = OTHER; note = 2-fluororibose guanine
  modified_base 2..3: mod_base = OTHER; note = phosphorothioate
  modified_base 3: mod_base = OTHER; note = 2-O-methylribose adenine
  modified_base 4: mod_base = um
  modified_base 5: mod_base = gm
  modified_base 6: mod_base = OTHER; note = 2-fluororibose uracil
  modified_base 7: mod_base = um
  modified_base 8: mod_base = cm
  modified_base 9: mod_base = OTHER; note = 2-O-methylribose adenine
  modified_base 10: mod_base = um
  modified_base 11: mod_base = gm
  modified_base 12: mod_base = gm
  modified_base 13: mod_base = cm
  modified_base 14: mod_base = OTHER; note = 2-fluororibose uracil
  modified_base 15: mod_base = um
  modified_base 16: mod_base = OTHER; note = 2-fluororibose uracil
  modified_base 17: mod_base = gm
  modified_base 18: mod_base = cm
  modified_base 19: mod_base = um
  modified_base 20: mod_base = cm
  modified_base 21: mod_base = um
  modified_base 21..22: mod_base = OTHER; note = phosphorothioate
  modified_base 22: mod_base = um
  modified_base 22..23: mod_base = OTHER; note = phosphorothioate
  modified_base 23: mod_base = um
  source 1..23: mol_type = other RNA
tgatgttcatggctttgctcttt

SEQ ID NO: 636 - RNA, 23 nt, synthetic construct
  misc_feature 1..23: note = Synthetic: WV-42355
  misc_feature 1..23: note = Synthetic: SSR-0105074
  modified_base 1: mod_base = um
  modified_base 1..2: mod_base = OTHER; note = phosphorothioate
  modified_base 2: mod_base = OTHER; note = 2-fluororibose adenine
  modified_base 2..3: mod_base = OTHER; note = phosphorothioate
  modified_base 3: mod_base = gm
  modified_base 4: mod_base = gm
  modified_base 5: mod_base = OTHER; note = 2-O-methylribose adenine
  modified_base 6: mod_base = OTHER; note = 2-fluororibose uracil
  modified_base 7: mod_base = gm
  modified_base 8: mod_base = OTHER; note = 2-O-methylribose adenine
  modified_base 9: mod_base = um
  modified_base 10: mod_base = gm
  modified_base 11: mod_base = um
  modified_base 12: mod_base = um
  modified_base 13: mod_base = cm
  modified_base 14: mod_base = OTHER; note = 2-fluororibose adenine
  modified_base 15: mod_base = um
  modified_base 16: mod_base = OTHER; note = 2-fluororibose guanine
  modified_base 17: mod_base = gm
  modified_base 18: mod_base = cm
  modified_base 19: mod_base = um
  modified_base 20: mod_base = um
  modified_base 21: mod_base = um
  modified_base 21..22: mod_base = OTHER; note = phosphorothioate
  modified_base 22: mod_base = um
  modified_base 22..23: mod_base = OTHER; note = phosphorothioate
  modified_base 23: mod_base = um
  source 1..23: mol_type = other RNA
taggatgatgttcatggcttttt

SEQ ID NO: 637 - RNA, 23 nt, synthetic construct
  misc_feature 1..23: note = Synthetic: WV-42356
  misc_feature 1..23: note = Synthetic: SSR-0105143
  modified_base 1: mod_base = um
  modified_base 1..2: mod_base = OTHER; note = phosphorothioate
  modified_base 2: mod_base = OTHER; note = 2-fluororibose uracil
  modified_base 2..3: mod_base = OTHER; note = phosphorothioate
  modified_base 3: mod_base = um
  modified_base 4: mod_base = um
  modified_base 5: mod_base = cm
  modified_base 6: mod_base = OTHER; note = 2-fluororibose uracil
  modified_base 7: mod_base = OTHER; note = 2-O-methylribose adenine
  modified_base 8: mod_base = gm
  modified_base 9: mod_base = gm
  modified_base 10: mod_base = OTHER; note = 2-O-methylribose adenine
  modified_base 11: mod_base = um
  modified_base 12: mod_base = gm
  modified_base 13: mod_base = OTHER; note = 2-O-methylribose adenine
  modified_base 14: mod_base = OTHER; note = 2-fluororibose uracil
  modified_base 15: mod_base = gm
  modified_base 16: mod_base = OTHER; note = 2-fluororibose uracil
  modified_base 17: mod_base = um
  modified_base 18: mod_base = cm
  modified_base 19: mod_base = OTHER; note = 2-O-methylribose adenine
  modified_base 20: mod_base = um
  modified_base 21: mod_base = gm
  modified_base 21..22: mod_base = OTHER; note = phosphorothioate
  modified_base 22: mod_base = um
  modified_base 22..23: mod_base = OTHER; note = phosphorothioate
  modified_base 23: mod_base = um
  source 1..23: mol_type = other RNA
ttttctaggatgatgttcatgtt

SEQ ID NO: 638 - RNA, 23 nt, synthetic construct
  misc_feature 1..23: note = Synthetic: WV-42357
  misc_feature 1..23: note = Synthetic: SSR-0105075
  modified_base 1: mod_base = um
  modified_base 1..2: mod_base = OTHER; note = phosphorothioate
  modified_base 2: mod_base = OTHER; note = 2-fluororibose adenine
  modified_base 2..3: mod_base = OTHER; note = phosphorothioate
  modified_base 3: mod_base = gm
  modified_base 4: mod_base = gm
  modified_base 5: mod_base = OTHER; note = 2-O-methylribose adenine
  modified_base 6: mod_base = OTHER; note = 2-fluororibose uracil
  modified_base 7: mod_base = um
  modified_base 8: mod_base = um
  modified_base 9: mod_base = cm
  modified_base 10: mod_base = um
  modified_base 11: mod_base = OTHER; note = 2-O-methylribose adenine
  modified_base 12: mod_base = gm
  modified_base 13: mod_base = gm
  modified_base 14: mod_base = OTHER; note = 2-fluororibose adenine
  modified_base 15: mod_base = um
  modified_base 16: mod_base = OTHER; note = 2-fluororibose guanine
  modified_base 17: mod_base = OTHER; note = 2-O-methylribose adenine
  modified_base 18: mod_base = um
  modified_base 19: mod_base = gm
  modified_base 20: mod_base = um
  modified_base 21: mod_base = um
  modified_base 21..22: mod_base = OTHER; note = phosphorothioate
  modified_base 22: mod_base = um
  modified_base 22..23: mod_base = OTHER; note = phosphorothioate
  modified_base 23: mod_base = um
  source 1..23: mol_type = other RNA
taggatttctaggatgatgtttt

SEQ ID NO: 639 - RNA, 23 nt, synthetic construct
  misc_feature 1..23: note = Synthetic: WV-42358
  misc_feature 1..23: note = Synthetic: SSR-0105073
  modified_base 1: mod_base = um
  modified_base 1..2: mod_base = OTHER; note = phosphorothioate
  modified_base 2: mod_base = OTHER; note = 2-fluororibose adenine
  modified_base 2..3: mod_base = OTHER; note = phosphorothioate
  modified_base 3: mod_base = gm
  modified_base 4: mod_base = cm
  modified_base 5: mod_base = OTHER; note = 2-O-methylribose adenine
  modified_base 6: mod_base = OTHER; note = 2-fluororibose guanine
  modified_base 7: mod_base = OTHER; note = 2-O-methylribose adenine
  modified_base 8: mod_base = OTHER; note = 2-O-methylribose adenine
  modified_base 9: mod_base = gm
  modified_base 10: mod_base = gm
  modified_base 11: mod_base = OTHER; note = 2-O-methylribose adenine
  modified_base 12: mod_base = um
  modified_base 13: mod_base = um
  modified_base 14: mod_base = OTHER; note = 2-fluororibose uracil
  modified_base 15: mod_base = cm
  modified_base 16: mod_base = OTHER; note = 2-fluororibose uracil
  modified_base 17: mod_base = OTHER; note = 2-O-methylribose adenine
  modified_base 18: mod_base = gm
  modified_base 19: mod_base = gm
  modified_base 20: mod_base = OTHER; note = 2-O-methylribose adenine
  modified_base 21: mod_base = um
  modified_base 21..22: mod_base = OTHER; note = phosphorothioate
  modified_base 22: mod_base = um
  modified_base 22..23: mod_base = OTHER; note = phosphorothioate
  modified_base 23: mod_base = um
  source 1..23: mol_type = other RNA
tagcagaaggatttctaggattt

SEQ ID NO: 640 - RNA, 23 nt, synthetic construct
  misc_feature 1..23: note = Synthetic: WV-42359
  misc_feature 1..23: note = Synthetic: SSR-0105102
  modified_base 1: mod_base = um
  modified_base 1..2: mod_base = OTHER; note = phosphorothioate
  modified_base 2: mod_base = OTHER; note = 2-fluororibose guanine
  modified_base 2..3: mod_base = OTHER; note = phosphorothioate
  modified_base 3: mod_base = OTHER; note = 2-O-methylribose adenine
  modified_base 4: mod_base = OTHER; note = 2-O-methylribose adenine
  modified_base 5: mod_base = gm
  modified_base 6: mod_base = OTHER; note = 2-fluororibose cytosine
  modified_base 7: mod_base = OTHER; note = 2-O-methylribose adenine
  modified_base 8: mod_base = gm
  modified_base 9: mod_base = OTHER; note = 2-O-methylribose adenine
  modified_base 10: mod_base = OTHER; note = 2-O-methylribose adenine
  modified_base 11: mod_base = gm
  modified_base 12: mod_base = gm
  modified_base 13: mod_base = OTHER; note = 2-O-methylribose adenine
  modified_base 14: mod_base = OTHER; note = 2-fluororibose uracil
  modified_base 15: mod_base = um
  modified_base 16: mod_base = OTHER; note = 2-fluororibose uracil
  modified_base 17: mod_base = cm
  modified_base 18: mod_base = um
  modified_base 19: mod_base = OTHER; note = 2-O-methylribose adenine
  modified_base 20: mod_base = gm
  modified_base 21: mod_base = gm
  modified_base 21..22: mod_base = OTHER; note = phosphorothioate
  modified_base 22: mod_base = um
  modified_base 22..23: mod_base = OTHER; note = phosphorothioate
  modified_base 23: mod_base = um
  source 1..23: mol_type = other RNA
tgaagcagaaggatttctaggtt

SEQ ID NO: 641 - RNA, 23 nt, synthetic construct
  misc_feature 1..23: note = Synthetic: WV-42360
  misc_feature 1..23: note = Synthetic: SSR-0105083
  modified_base 1: mod_base = um
  modified_base 1..2: mod_base = OTHER; note = phosphorothioate
  modified_base 2: mod_base = OTHER; note = 2-fluororibose adenine
  modified_base 2..3: mod_base = OTHER; note = phosphorothioate
  modified_base 3: mod_base = um
  modified_base 4: mod_base = gm
  modified_base 5: mod_base = OTHER; note = 2-O-methylribose adenine
  modified_base 6: mod_base = OTHER; note = 2-fluororibose uracil
  modified_base 7: mod_base = gm
  modified_base 8: mod_base = gm
  modified_base 9: mod_base = um
  modified_base 10: mod_base = gm
  modified_base 11: mod_base = OTHER; note = 2-O-methylribose adenine
  modified_base 12: mod_base = um
  modified_base 13: mod_base = cm
  modified_base 14: mod_base = OTHER; note = 2-fluororibose adenine
  modified_base 15: mod_base = gm
  modified_base 16: mod_base = OTHER; note = 2-fluororibose adenine
  modified_base 17: mod_base = OTHER; note = 2-O-methylribose adenine
  modified_base 18: mod_base = gm
  modified_base 19: mod_base = cm
  modified_base 20: mod_base = OTHER; note = 2-O-methylribose adenine
  modified_base 21: mod_base = gm
  modified_base 21..22: mod_base = OTHER; note = phosphorothioate
  modified_base 22: mod_base = um
  modified_base 22..23: mod_base = OTHER; note = phosphorothioate
  modified_base 23: mod_base = um
  source 1..23: mol_type = other RNA
tatgatggtgatcagaagcagtt

SEQ ID NO: 642 - RNA, 23 nt, synthetic construct
  misc_feature 1..23: note = Synthetic: WV-42361
  misc_feature 1..23: note = Synthetic: SSR-0105071
  modified_base 1: mod_base = um
  modified_base 1..2: mod_base = OTHER; note = phosphorothioate
  modified_base 2: mod_base = OTHER; note = 2-fluororibose adenine
  modified_base 2..3: mod_base = OTHER; note = phosphorothioate
  modified_base 3: mod_base = gm
  modified_base 4: mod_base = OTHER; note = 2-O-methylribose adenine
  modified_base 5: mod_base = um
  modified_base 6: mod_base = OTHER; note = 2-fluororibose guanine
  modified_base 7: mod_base = OTHER; note = 2-O-methylribose adenine
  modified_base 8: mod_base = um
  modified_base 9: mod_base = gm
  modified_base 10: mod_base = gm
  modified_base 11: mod_base = um
  modified_base 12: mod_base = gm
  modified_base 13: mod_base = OTHER; note = 2-O-methylribose adenine
  modified_base 14: mod_base = OTHER; note = 2-fluororibose uracil
  modified_base 15: mod_base = cm
  modified_base 16: mod_base = OTHER; note = 2-fluororibose adenine
  modified_base 17: mod_base = gm
  modified_base 18: mod_base = OTHER; note = 2-O-methylribose adenine
  modified_base 19: mod_base = OTHER; note = 2-O-methylribose adenine
  modified_base 20: mod_base = gm
  modified_base 21: mod_base = cm
  modified_base 21..22: mod_base = OTHER; note = phosphorothioate
  modified_base 22: mod_base = um
  modified_base 22..23: mod_base = OTHER; note = phosphorothioate
  modified_base 23: mod_base = um
  source 1..23: mol_type = other RNA
tagatgatggtgatcagaagctt

SEQ ID NO: 643 - RNA, 23 nt, synthetic construct
  misc_feature 1..23: note = Synthetic: WV-42362
  misc_feature 1..23: note = Synthetic: SSR-0105116
  modified_base 1: mod_base = um
  modified_base 1..2: mod_base = OTHER; note = phosphorothioate
  modified_base 2: mod_base = OTHER; note = 2-fluororibose guanine
  modified_base 2..3: mod_base = OTHER; note = phosphorothioate
  modified_base 3: mod_base = um
  modified_base 4: mod_base = OTHER; note = 2-O-methylribose adenine
  modified_base 5: mod_base = OTHER; note = 2-O-methylribose adenine
  modified_base 6: mod_base = OTHER; note = 2-fluororibose uracil
  modified_base 7: mod_base = gm
  modified_base 8: mod_base = OTHER; note = 2-O-methylribose adenine
  modified_base 9: mod_base = gm
  modified_base 10: mod_base = OTHER; note = 2-O-methylribose adenine
  modified_base 11: mod_base = OTHER; note = 2-O-methylribose adenine
  modified_base 12: mod_base = cm
  modified_base 13: mod_base = OTHER; note = 2-O-methylribose adenine
  modified_base 14: mod_base = OTHER; note = 2-fluororibose adenine
  modified_base 15: mod_base = um
  modified_base 16: mod_base = OTHER; note = 2-fluororibose cytosine
  modified_base 17: mod_base = um
  modified_base 18: mod_base = cm
  modified_base 19: mod_base = cm
  modified_base 20: mod_base = cm
  modified_base 21: mod_base = cm
  modified_base 21..22: mod_base = OTHER; note = phosphorothioate
  modified_base 22: mod_base = um
  modified_base 22..23: mod_base = OTHER; note = phosphorothioate
  modified_base 23: mod_base = um
  source 1..23: mol_type = other RNA
tgtaatgagaacaatctcccctt

SEQ ID NO: 644 - RNA, 23 nt, synthetic construct
  misc_feature 1..23: note = Synthetic: WV-42363
  misc_feature 1..23: note = Synthetic: SSR-0105076
  modified_base 1: mod_base = um
  modified_base 1..2: mod_base = OTHER; note = phosphorothioate
  modified_base 2: mod_base = OTHER; note = 2-fluororibose adenine
  modified_base 2..3: mod_base = OTHER; note = phosphorothioate
  modified_base 3: mod_base = gm
  modified_base 4: mod_base = um
  modified_base 5: mod_base = OTHER; note = 2-O-methylribose adenine
  modified_base 6: mod_base = OTHER; note = 2-fluororibose adenine
  modified_base 7: mod_base = um
  modified_base 8: mod_base = gm
  modified_base 9: mod_base = OTHER; note = 2-O-methylribose adenine
  modified_base 10: mod_base = gm
  modified_base 11: mod_base = OTHER; note = 2-O-methylribose adenine
  modified_base 12: mod_base = OTHER; note = 2-O-methylribose adenine
  modified_base 13: mod_base = cm
  modified_base 14: mod_base = OTHER; note = 2-fluororibose adenine
  modified_base 15: mod_base = OTHER; note = 2-O-methylribose adenine
  modified_base 16: mod_base = OTHER; note = 2-fluororibose uracil
  modified_base 17: mod_base = cm
  modified_base 18: mod_base = um
  modified_base 19: mod_base = cm
  modified_base 20: mod_base = cm
  modified_base 21: mod_base = cm
  modified_base 21..22: mod_base = OTHER; note = phosphorothioate
  modified_base 22: mod_base = um
  modified_base 22..23: mod_base = OTHER; note = phosphorothioate
  modified_base 23: mod_base = um
  source 1..23: mol_type = other RNA
tagtaatgagaacaatctccctt

SEQ ID NO: 645 - RNA, 23 nt, synthetic construct
  misc_feature 1..23: note = Synthetic: WV-42364
  misc_feature 1..23: note = Synthetic: SSR-0105120
  modified_base 1: mod_base = um
  modified_base 1..2: mod_base = OTHER; note = phosphorothioate
  modified_base 2: mod_base = OTHER; note = 2-fluororibose guanine
  modified_base 2..3: mod_base = OTHER; note = phosphorothioate
  modified_base 3: mod_base = um
  modified_base 4: mod_base = um
  modified_base 5: mod_base = OTHER; note = 2-O-methylribose adenine
  modified_base 6: mod_base = OTHER; note = 2-fluororibose cytosine
  modified_base 7: mod_base = OTHER; note = 2-O-methylribose adenine
  modified_base 8: mod_base = um
  modified_base 9: mod_base = cm
  modified_base 10: mod_base = OTHER; note = 2-O-methylribose adenine
  modified_base 11: mod_base = cm
  modified_base 12: mod_base = cm
  modified_base 13: mod_base = cm
  modified_base 14: mod_base = OTHER; note = 2-fluororibose adenine
  modified_base 15: mod_base = cm
  modified_base 16: mod_base = OTHER; note = 2-fluororibose uracil
  modified_base 17: mod_base = um
  modified_base 18: mod_base = cm
  modified_base 19: mod_base = um
  modified_base 20: mod_base = um
  modified_base 21: mod_base = um
  modified_base 21..22: mod_base = OTHER; note = phosphorothioate
  modified_base 22: mod_base = um
  modified_base 22..23: mod_base = OTHER; note = phosphorothioate
  modified_base 23: mod_base = um
  source 1..23: mol_type = other RNA
tgttacatcacccacttcttttt

SEQ ID NO: 646 - RNA, 23 nt, synthetic construct
  misc_feature 1..23: note = Synthetic: WV-42365
  misc_feature 1..23: note = Synthetic: SSR-0105091
  modified_base 1: mod_base = um
  modified_base 1..2: mod_base = OTHER; note = phosphorothioate
  modified_base 2: mod_base = OTHER; note = 2-fluororibose cytosine
  modified_base 2..3: mod_base = OTHER; note = phosphorothioate
  modified_base 3: mod_base = OTHER; note = 2-O-methylribose adenine
  modified_base 4: mod_base = cm
  modified_base 5: mod_base = cm
  modified_base 6: mod_base = OTHER; note = 2-fluororibose adenine
  modified_base 7: mod_base = cm
  modified_base 8: mod_base = gm
  modified_base 9: mod_base = OTHER; note = 2-O-methylribose adenine
  modified_base 10: mod_base = um
  modified_base 11: mod_base = um
  modified_base 12: mod_base = gm
  modified_base 13: mod_base = um
  modified_base 14: mod_base = OTHER; note = 2-fluororibose uracil
  modified_base 15: mod_base = OTHER; note = 2-O-methylribose adenine
  modified_base 16: mod_base = OTHER; note = 2-fluororibose cytosine
  modified_base 17: mod_base = OTHER; note = 2-O-methylribose adenine
  modified_base 18: mod_base = um
  modified_base 19: mod_base = cm
  modified_base 20: mod_base = OTHER; note = 2-O-methylribose adenine
  modified_base 21: mod_base = cm
  modified_base 21..22: mod_base = OTHER; note = phosphorothioate
  modified_base 22: mod_base = um
  modified_base 22..23: mod_base = OTHER; note = phosphorothioate
  modified_base 23: mod_base = um
  source 1..23: mol_type = other RNA
tcaccacgattgttacatcactt

SEQ ID NO: 647 - RNA, 23 nt, synthetic construct
  misc_feature 1..23: note = Synthetic: WV-42366
  misc_feature 1..23: note = Synthetic: SSR-0105129
  modified_base 1: mod_base = um
  modified_base 1..2: mod_base = OTHER; note = phosphorothioate
  modified_base 2: mod_base = OTHER; note = 2-fluororibose uracil
  modified_base 2..3: mod_base = OTHER; note = phosphorothioate
  modified_base 3: mod_base = OTHER; note = 2-O-methylribose adenine
  modified_base 4: mod_base = um
  modified_base 5: mod_base = um
  modified_base 6: mod_base = OTHER; note = 2-fluororibose cytosine
  modified_base 7: mod_base = OTHER; note = 2-O-methylribose adenine
  modified_base 8: mod_base = cm
  modified_base 9: mod_base = cm
  modified_base 10: mod_base = OTHER; note = 2-O-methylribose adenine
  modified_base 11: mod_base = cm
  modified_base 12: mod_base = gm
  modified_base 13: mod_base = OTHER; note = 2-O-methylribose adenine
  modified_base 14: mod_base = OTHER; note = 2-fluororibose uracil
  modified_base 15: mod_base = um
  modified_base 16: mod_base = OTHER; note = 2-fluororibose guanine
  modified_base 17: mod_base = um
  modified_base 18: mod_base = um
  modified_base 19: mod_base = OTHER; note = 2-O-methylribose adenine
  modified_base 20: mod_base = cm
  modified_base 21: mod_base = OTHER; note = 2-O-methylribose adenine
  modified_base 21..22: mod_base = OTHER; note = phosphorothioate
  modified_base 22: mod_base = um
  modified_base 22..23: mod_base = OTHER; note = phosphorothioate
  modified_base 23: mod_base = um
  source 1..23: mol_type = other RNA
ttattcaccacgattgttacatt

SEQ ID NO: 648 - RNA, 23 nt, synthetic construct
  misc_feature 1..23: note = Synthetic: WV-42367
  misc_feature 1..23: note = Synthetic: SSR-0105070
  modified_base 1: mod_base = um
  modified_base 1..2: mod_base = OTHER; note = phosphorothioate
  modified_base 2: mod_base = OTHER; note = 2-fluororibose adenine
  modified_base 2..3: mod_base = OTHER; note = phosphorothioate
  modified_base 3: mod_base = gm
  modified_base 4: mod_base = OTHER; note = 2-O-methylribose adenine
  modified_base 5: mod_base = um
  modified_base 6: mod_base = OTHER; note = 2-fluororibose cytosine
  modified_base 7: mod_base = gm
  modified_base 8: mod_base = gm
  modified_base 9: mod_base = cm
  modified_base 10: mod_base = um
  modified_base 11: mod_base = gm
  modified_base 12: mod_base = gm
  modified_base 13: mod_base = OTHER; note = 2-O-methylribose adenine
  modified_base 14: mod_base = OTHER; note = 2-fluororibose uracil
  modified_base 15: mod_base = OTHER; note = 2-O-methylribose adenine
  modified_base 16: mod_base = OTHER; note = 2-fluororibose uracil
  modified_base 17: mod_base = OTHER; note = 2-O-methylribose adenine
  modified_base 18: mod_base = cm
  modified_base 19: mod_base = um
  modified_base 20: mod_base = gm
  modified_base 21: mod_base = um
  modified_base 21..22: mod_base = OTHER; note = phosphorothioate
  modified_base 22: mod_base = um
  modified_base 22..23: mod_base = OTHER; note = phosphorothioate
  modified_base 23: mod_base = um
  source 1..23: mol_type = other RNA
tagatcggctggatatactgttt

SEQ ID NO: 649 - RNA, 23 nt, synthetic construct
  misc_feature 1..23: note = Synthetic: WV-42368
  misc_feature 1..23: note = Synthetic: SSR-0105133
  modified_base 1: mod_base = um
  modified_base 1..2: mod_base = OTHER; note = phosphorothioate
  modified_base 2: mod_base = OTHER; note = 2-fluororibose uracil
  modified_base 2..3: mod_base = OTHER; note = phosphorothioate
  modified_base 3: mod_base = cm
  modified_base 4: mod_base = um
  modified_base 5: mod_base = cm
  modified_base 6: mod_base = OTHER; note = 2-fluororibose uracil
  modified_base 7: mod_base = um
  modified_base 8: mod_base = cm
  modified_base 9: mod_base = OTHER; note = 2-O-methylribose adenine
  modified_base 10: mod_base = um
  modified_base 11: mod_base = cm
  modified_base 12: mod_base = cm
  modified_base 13: mod_base = um
  modified_base 14: mod_base = OTHER; note = 2-fluororibose uracil
  modified_base 15: mod_base = gm
  modified_base 16: mod_base = OTHER; note = 2-fluororibose guanine
  modified_base 17: mod_base = um
  modified_base 18: mod_base = gm
  modified_base 19: mod_base = cm
  modified_base 20: mod_base = um
  modified_base 21: mod_base = gm
  modified_base 21..22: mod_base = OTHER; note = phosphorothioate
  modified_base 22: mod_base = um
  modified_base 22..23: mod_base = OTHER; note = phosphorothioate
  modified_base 23: mod_base = um
  source 1..23: mol_type = other RNA
ttctcttcatccttggtgctgtt

SEQ ID NO: 650 - RNA, 23 nt, synthetic construct
  misc_feature 1..23: note = Synthetic: WV-42369
  misc_feature 1..23: note = Synthetic: SSR-0105082
  modified_base 1: mod_base = um
  modified_base 1..2: mod_base = OTHER; note = phosphorothioate
  modified_base 2: mod_base = OTHER; note = 2-fluororibose adenine
  modified_base 2..3: mod_base = OTHER; note = phosphorothioate
  modified_base 3: mod_base = um
  modified_base 4: mod_base = cm
  modified_base 5: mod_base = um
  modified_base 6: mod_base = OTHER; note = 2-fluororibose cytosine
  modified_base 7: mod_base = um
  modified_base 8: mod_base = um
  modified_base 9: mod_base = cm
  modified_base 10: mod_base = OTHER; note = 2-O-methylribose adenine
  modified_base 11: mod_base = um
  modified_base 12: mod_base = cm
  modified_base 13: mod_base = cm
  modified_base 14: mod_base = OTHER; note = 2-fluororibose uracil
  modified_base 15: mod_base = um
  modified_base 16: mod_base = OTHER; note = 2-fluororibose guanine
  modified_base 17: mod_base = gm
  modified_base 18: mod_base = um
  modified_base 19: mod_base = gm
  modified_base 20: mod_base = cm
  modified_base 21: mod_base = um
  modified_base 21..22: mod_base = OTHER; note = phosphorothioate
  modified_base 22: mod_base = um
  modified_base 22..23: mod_base = OTHER; note = phosphorothioate
  modified_base 23: mod_base = um
  source 1..23: mol_type = other RNA
tatctcttcatccttggtgcttt

SEQ ID NO: 651 - RNA, 23 nt, synthetic construct
  misc_feature 1..23: note = Synthetic: WV-42370
  misc_feature 1..23: note = Synthetic: SSR-0105114
  modified_base 1: mod_base = um
  modified_base 1..2: mod_base = OTHER; note = phosphorothioate
  modified_base 2: mod_base = OTHER; note = 2-fluororibose guanine
  modified_base 2..3: mod_base = OTHER; note = phosphorothioate
  modified_base 3: mod_base = gm
  modified_base 4: mod_base = um
  modified_base 5: mod_base = OTHER; note = 2-O-methylribose adenine
  modified_base 6: mod_base = OTHER; note = 2-fluororibose adenine
  modified_base 7: mod_base = um
  modified_base 8: mod_base = cm
  modified_base 9: mod_base = um
  modified_base 10: mod_base = cm
  modified_base 11: mod_base = um
  modified_base 12: mod_base = um
  modified_base 13: mod_base = cm
  modified_base 14: mod_base = OTHER; note = 2-fluororibose adenine
  modified_base 15: mod_base = um
  modified_base 16: mod_base = OTHER; note = 2-fluororibose cytosine
  modified_base 17: mod_base = cm
  modified_base 18: mod_base = um
  modified_base 19: mod_base = um
  modified_base 20: mod_base = gm
  modified_base 21: mod_base = gm
  modified_base 21..22: mod_base = OTHER; note = phosphorothioate
  modified_base 22: mod_base = um
  modified_base 22..23: mod_base = OTHER; note = phosphorothioate
  modified_base 23: mod_base = um
  source 1..23: mol_type = other RNA
tggtaatctcttcatccttggtt

SEQ ID NO: 652 - RNA, 23 nt, synthetic construct
  misc_feature 1..23: note = Synthetic: WV-42371
  misc_feature 1..23: note = Synthetic: SSR-0105113
  modified_base 1: mod_base = um
  modified_base 1..2: mod_base = OTHER; note = phosphorothioate
  modified_base 2: mod_base = OTHER; note = 2-fluororibose guanine
  modified_base 2..3: mod_base = OTHER; note = phosphorothioate
  modified_base 3: mod_base = gm
  modified_base 4: mod_base = OTHER; note = 2-O-methylribose adenine
  modified_base 5: mod_base = um
  modified_base 6: mod_base = OTHER; note = 2-fluororibose guanine
  modified_base 7: mod_base = um
  modified_base 8: mod_base = um
  modified_base 9: mod_base = gm
  modified_base 10: mod_base = OTHER; note = 2-O-methylribose adenine
  modified_base 11: mod_base = cm
  modified_base 12: mod_base = cm
  modified_base 13: mod_base = um
  modified_base 14: mod_base = OTHER; note = 2-fluororibose cytosine
  modified_base 15: mod_base = OTHER; note = 2-O-methylribose adenine
  modified_base 16: mod_base = OTHER; note = 2-fluororibose adenine
  modified_base 17: mod_base = OTHER; note = 2-O-methylribose adenine
  modified_base 18: mod_base = um
  modified_base 19: mod_base = gm
  modified_base 20: mod_base = um
  modified_base 21: mod_base = cm
  modified_base 21..22: mod_base = OTHER; note = phosphorothioate
  modified_base 22: mod_base = um
  modified_base 22..23: mod_base = OTHER; note = phosphorothioate
  modified_base 23: mod_base = um
  source 1..23: mol_type = other RNA
tggatgttgacctcaaatgtctt

SEQ ID NO: 653 - RNA, 23 nt, synthetic construct
  misc_feature 1..23: note = Synthetic: WV-42372
  misc_feature 1..23: note = Synthetic: SSR-0105108
  modified_base 1: mod_base = um
  modified_base 1..2: mod_base = OTHER; note = phosphorothioate
  modified_base 2: mod_base = OTHER; note = 2-fluororibose guanine
  modified_base 2..3: mod_base = OTHER; note = phosphorothioate
  modified_base 3: mod_base = OTHER; note = 2-O-methylribose adenine
  modified_base 4: mod_base = um
  modified_base 5: mod_base = cm
  modified_base 6: mod_base = OTHER; note = 2-fluororibose cytosine
  modified_base 7: mod_base = OTHER; note = 2-O-methylribose adenine
  modified_base 8: mod_base = OTHER; note = 2-O-methylribose adenine
  modified_base 9: mod_base = OTHER; note = 2-O-methylribose adenine
  modified_base 10: mod_base = OTHER; note = 2-O-methylribose adenine
  modified_base 11: mod_base = OTHER; note = 2-O-methylribose adenine
  modified_base 12: mod_base = um
  modified_base 13: mod_base = gm
  modified_base 14: mod_base = OTHER; note = 2-fluororibose uracil
  modified_base 15: mod_base = cm
  modified_base 16: mod_base = OTHER; note = 2-fluororibose cytosine
  modified_base 17: mod_base = um
  modified_base 18: mod_base = OTHER; note = 2-O-methylribose adenine
  modified_base 19: mod_base = gm
  modified_base 20: mod_base = gm
  modified_base 21: mod_base = OTHER; note = 2-O-methylribose adenine
  modified_base 21..22: mod_base = OTHER; note = phosphorothioate
  modified_base 22: mod_base = um
  modified_base 22..23: mod_base = OTHER; note = phosphorothioate
  modified_base 23: mod_base = um
  source 1..23: mol_type = other RNA
tgatccaaaaatgtcctaggatt

SEQ ID NO: 654 - RNA, 23 nt, synthetic construct
  misc_feature 1..23: note = Synthetic: WV-42373
  misc_feature 1..23: note = Synthetic: SSR-0105119
  modified_base 1: mod_base = um
  modified_base 1..2: mod_base = OTHER; note = phosphorothioate
  modified_base 2: mod_base = OTHER; note = 2-fluororibose guanine
  modified_base 2..3: mod_base = OTHER; note = phosphorothioate
  modified_base 3: mod_base = um
  modified_base 4: mod_base = gm
  modified_base 5: mod_base = OTHER; note = 2-O-methylribose adenine
  modified_base 6: mod_base = OTHER; note = 2-fluororibose uracil
  modified_base 7: mod_base = cm
  modified_base 8: mod_base = cm
  modified_base 9: mod_base = OTHER; note = 2-O-methylribose adenine
  modified_base 10: mod_base = OTHER; note = 2-O-methylribose adenine
  modified_base 11: mod_base = OTHER; note = 2-O-methylribose adenine
  modified_base 12: mod_base = OTHER; note = 2-O-methylribose adenine
  modified_base 13: mod_base = OTHER; note = 2-O-methylribose adenine
  modified_base 14: mod_base = OTHER; note = 2-fluororibose uracil
  modified_base 15: mod_base = gm
  modified_base 16: mod_base = OTHER; note = 2-fluororibose uracil
  modified_base 17: mod_base = cm
  modified_base 18: mod_base = cm
  modified_base 19: mod_base = um
  modified_base 20: mod_base = OTHER; note = 2-O-methylribose adenine
  modified_base 21: mod_base = gm
  modified_base 21..22: mod_base = OTHER; note = phosphorothioate
  modified_base 22: mod_base = um
  modified_base 22..23: mod_base = OTHER; note = phosphorothioate
  modified_base 23: mod_base = um
  source 1..23: mol_type = other RNA
tgtgatccaaaaatgtcctagtt

SEQ ID NO: 655 - RNA, 23 nt, synthetic construct
  misc_feature 1..23: note = Synthetic: WV-42374
  misc_feature 1..23: note = Synthetic: SSR-0105103
  modified_base 1: mod_base = um
  modified_base 1..2: mod_base = OTHER; note = phosphorothioate
  modified_base 2: mod_base = OTHER; note = 2-fluororibose guanine
  modified_base 2..3: mod_base = OTHER; note = phosphorothioate
  modified_base 3: mod_base = OTHER; note = 2-O-methylribose adenine
  modified_base 4: mod_base = OTHER; note = 2-O-methylribose adenine
  modified_base 5: mod_base = gm
  modified_base 6: mod_base = OTHER; note = 2-fluororibose uracil
  modified_base 7: mod_base = gm
  modified_base 8: mod_base = cm
  modified_base 9: mod_base = um
  modified_base 10: mod_base = um
  modified_base 11: mod_base = um
  modified_base 12: mod_base = um
  modified_base 13: mod_base = gm
  modified_base 14: mod_base = OTHER; note = 2-fluororibose uracil
  modified_base 15: mod_base = gm
  modified_base 16: mod_base = OTHER; note = 2-fluororibose adenine
  modified_base 17: mod_base = um
  modified_base 18: mod_base = cm
  modified_base 19: mod_base = cm
  modified_base 20: mod_base = OTHER; note = 2-O-methylribose adenine
  modified_base 21: mod_base = OTHER; note = 2-O-methylribose adenine
  modified_base 21..22: mod_base = OTHER; note = phosphorothioate
  modified_base 22: mod_base = um
  modified_base 22..23: mod_base = OTHER; note = phosphorothioate
  modified_base 23: mod_base = um
  source 1..23: mol_type = other RNA
tgaagtgcttttgtgatccaatt

SEQ ID NO: 656 - RNA, 23 nt, synthetic construct
  misc_feature 1..23: note = Synthetic: WV-42375
  misc_feature 1..23: note = Synthetic: SSR-0105136
  modified_base 1: mod_base = um
  modified_base 1..2: mod_base = OTHER; note = phosphorothioate
  modified_base 2: mod_base = OTHER; note = 2-fluororibose uracil
  modified_base 2..3: mod_base = OTHER; note = phosphorothioate
  modified_base 3: mod_base = gm
  modified_base 4: mod_base = gm
  modified_base 5: mod_base = OTHER; note = 2-O-methylribose adenine
  modified_base 6: mod_base = OTHER; note = 2-fluororibose adenine
  modified_base 7: mod_base = gm
  modified_base 8: mod_base = OTHER; note = 2-O-methylribose adenine
  modified_base 9: mod_base = OTHER; note = 2-O-methylribose adenine
  modified_base 10: mod_base = gm
  modified_base 11: mod_base = um
  modified_base 12: mod_base = gm
  modified_base 13: mod_base = cm
  modified_base 14: mod_base = OTHER; note = 2-fluororibose uracil
  modified_base 15: mod_base = um
  modified_base 16: mod_base = OTHER; note = 2-fluororibose uracil
  modified_base 17: mod_base = um
  modified_base 18: mod_base = gm
  modified_base 19: mod_base = um
  modified_base 20: mod_base = gm
  modified_base 21: mod_base = OTHER; note = 2-O-methylribose adenine
  modified_base 21..22: mod_base = OTHER; note = phosphorothioate
  modified_base 22: mod_base = um
  modified_base 22..23: mod_base = OTHER; note = phosphorothioate
  modified_base 23: mod_base = um
  source 1..23: mol_type = other RNA
ttggaagaagtgcttttgtgatt

SEQ ID NO: 657 - RNA, 23 nt, synthetic construct
  misc_feature 1..23: note = Synthetic: WV-42376
  misc_feature 1..23: note = Synthetic: SSR-0105142
  modified_base 1: mod_base = um
  modified_base 1..2: mod_base = OTHER; note = phosphorothioate
  modified_base 2: mod_base = OTHER; note = 2-fluororibose uracil
  modified_base 2..3: mod_base = OTHER; note = phosphorothioate
  modified_base 3: mod_base = um
  modified_base 4: mod_base = gm
  modified_base 5: mod_base = cm
  modified_base 6: mod_base = OTHER; note = 2-fluororibose uracil
  modified_base 7: mod_base = gm
  modified_base 8: mod_base = gm
  modified_base 9: mod_base = OTHER; note = 2-O-methylribose adenine
  modified_base 10: mod_base = OTHER; note = 2-O-methylribose adenine
  modified_base 11: mod_base = cm
  modified_base 12: mod_base = OTHER; note = 2-O-methylribose adenine
  modified_base 13: mod_base = OTHER; note = 2-O-methylribose adenine
  modified_base 14: mod_base = OTHER; note = 2-fluororibose uracil
  modified_base 15: mod_base = OTHER; note = 2-O-methylribose adenine
  modified_base 16: mod_base = OTHER; note = 2-fluororibose uracil
  modified_base 17: mod_base = gm
  modified_base 18: mod_base = gm
  modified_base 19: mod_base = gm
  modified_base 20: mod_base = OTHER; note = 2-O-methylribose adenine
  modified_base 21: mod_base = um
  modified_base 21..22: mod_base = OTHER; note = phosphorothioate
  modified_base 22: mod_base = um
  modified_base 22..23: mod_base = OTHER; note = phosphorothioate
  modified_base 23: mod_base = um
  source 1..23: mol_type = other RNA
tttgctggaacaatatgggattt

SEQ ID NO: 658 - RNA, 23 nt, synthetic construct
  misc_feature 1..23: note = Synthetic: WV-42377
  misc_feature 1..23: note = Synthetic: SSR-0105096
  modified_base 1: mod_base = um
  modified_base 1..2: mod_base = OTHER; note = phosphorothioate
  modified_base 2: mod_base = OTHER; note = 2-fluororibose cytosine
  modified_base 2..3: mod_base = OTHER; note = phosphorothioate
  modified_base 3: mod_base = um
  modified_base 4: mod_base = gm
  modified_base 5: mod_base = um
  modified_base 6: mod_base = OTHER; note = 2-fluororibose guanine
  modified_base 7: mod_base = OTHER; note = 2-O-methylribose adenine
  modified_base 8: mod_base = OTHER; note = 2-O-methylribose adenine
  modified_base 9: mod_base = OTHER; note = 2-O-methylribose adenine
  modified_base 10: mod_base = gm
  modified_base 11: mod_base = cm
  modified_base 12: mod_base = cm
  modified_base 13: mod_base = OTHER; note = 2-O-methylribose adenine
  modified_base 14: mod_base = OTHER; note = 2-fluororibose adenine
  modified_base 15: mod_base = cm
  modified_base 16: mod_base = OTHER; note = 2-fluororibose adenine
  modified_base 17: mod_base = gm
  modified_base 18: mod_base = cm
  modified_base 19: mod_base = gm
  modified_base 20: mod_base = gm
  modified_base 21: mod_base = cm
  modified_base 21..22: mod_base = OTHER; note = phosphorothioate
  modified_base 22: mod_base = um
  modified_base 22..23: mod_base = OTHER; note = phosphorothioate
  modified_base 23: mod_base = um
  source 1..23: mol_type = other RNA
tctgtgaaagccaacagcggctt

SEQ ID NO: 659 - RNA, 23 nt, synthetic construct
  misc_feature 1..23: note = Synthetic: WV-42378
  misc_feature 1..23: note = Synthetic: SSR-0105092
  modified_base 1: mod_base = um
  modified_base 1..2: mod_base = OTHER; note = phosphorothioate
  modified_base 2: mod_base = OTHER; note = 2-fluororibose cytosine
  modified_base 2..3: mod_base = OTHER; note = phosphorothioate
  modified_base 3: mod_base = OTHER; note = 2-O-methylribose adenine
  modified_base 4: mod_base = gm
  modified_base 5: mod_base = OTHER; note = 2-O-methylribose adenine
  modified_base 6: mod_base = OTHER; note = 2-fluororibose cytosine
  modified_base 7: mod_base = cm
  modified_base 8: mod_base = um
  modified_base 9: mod_base = cm
  modified_base 10: mod_base = um
  modified_base 11: mod_base = gm
  modified_base 12: mod_base = um
  modified_base 13: mod_base = gm
  modified_base 14: mod_base = OTHER; note = 2-fluororibose adenine
  modified_base 15: mod_base = OTHER; note = 2-O-methylribose adenine
  modified_base 16: mod_base = OTHER; note = 2-fluororibose adenine
  modified_base 17: mod_base = gm
  modified_base 18: mod_base = cm
  modified_base 19: mod_base = cm
  modified_base 20: mod_base = OTHER; note = 2-O-methylribose adenine
  modified_base 21: mod_base = OTHER; note = 2-O-methylribose adenine
  modified_base 21..22: mod_base = OTHER; note = phosphorothioate
  modified_base 22: mod_base = um
  modified_base 22..23: mod_base = OTHER; note = phosphorothioate
  modified_base 23: mod_base = um
  source 1..23: mol_type = other RNA
tcagacctctgtgaaagccaatt

SEQ ID NO: 660 - RNA, 23 nt, synthetic construct
  misc_feature 1..23: note = Synthetic: WV-42379
  misc_feature 1..23: note = Synthetic: SSR-0105117
  modified_base 1: mod_base = um
  modified_base 1..2: mod_base = OTHER; note = phosphorothioate
  modified_base 2: mod_base = OTHER; note = 2-fluororibose guanine
  modified_base 2..3: mod_base = OTHER; note = phosphorothioate
  modified_base 3: mod_base = um
  modified_base 4: mod_base = cm
  modified_base 5: mod_base = OTHER; note = 2-O-methylribose adenine
  modified_base 6: mod_base = OTHER; note = 2-fluororibose guanine
  modified_base 7: mod_base = OTHER; note = 2-O-methylribose adenine
  modified_base 8: mod_base = cm
  modified_base 9: mod_base = cm
  modified_base 10: mod_base = um
  modified_base 11: mod_base = cm
  modified_base 12: mod_base = um
  modified_base 13: mod_base = gm
  modified_base 14: mod_base = OTHER; note = 2-fluororibose uracil
  modified_base 15: mod_base = gm
  modified_base 16: mod_base = OTHER; note = 2-fluororibose adenine
  modified_base 17: mod_base = OTHER; note = 2-O-methylribose adenine
  modified_base 18: mod_base = OTHER; note = 2-O-methylribose adenine
  modified_base 19: mod_base = gm
  modified_base 20: mod_base = cm
  modified_base 21: mod_base = cm
  modified_base 21..22: mod_base = OTHER; note = phosphorothioate
  modified_base 22: mod_base = um
  modified_base 22..23: mod_base = OTHER; note = phosphorothioate
  modified_base 23: mod_base = um
  source 1..23: mol_type = other RNA
tgtcagacctctgtgaaagcctt

SEQ ID NO: 661 - RNA, 23 nt, synthetic construct
  misc_feature 1..23: note = Synthetic: WV-42380
  misc_feature 1..23: note = Synthetic: SSR-0105104
  modified_base 1: mod_base = um
  modified_base 1..2: mod_base = OTHER; note = phosphorothioate
  modified_base 2: mod_base = OTHER; note = 2-fluororibose guanine
  modified_base 2..3: mod_base = OTHER; note = phosphorothioate
  modified_base 3: mod_base = OTHER; note = 2-O-methylribose adenine
  modified_base 4: mod_base = OTHER; note = 2-O-methylribose adenine
  modified_base 5: mod_base = gm
  modified_base 6: mod_base = OTHER; note = 2-fluororibose uracil
  modified_base 7: mod_base = um
  modified_base 8: mod_base = cm
  modified_base 9: mod_base = um
  modified_base 10: mod_base = gm
  modified_base 11: mod_base = OTHER; note = 2-O-methylribose adenine
  modified_base 12: mod_base = um
  modified_base 13: mod_base = gm
  modified_base 14: mod_base = OTHER; note = 2-fluororibose uracil
  modified_base 15: mod_base = cm
  modified_base 16: mod_base = OTHER; note = 2-fluororibose adenine
  modified_base 17: mod_base = gm
  modified_base 18: mod_base = OTHER; note = 2-O-methylribose adenine
  modified_base 19: mod_base = cm
  modified_base 20: mod_base = cm
  modified_base 21: mod_base = um
  modified_base 21..22: mod_base = OTHER; note = phosphorothioate
  modified_base 22: mod_base = um
  modified_base 22..23: mod_base = OTHER; note = phosphorothioate
  modified_base 23: mod_base = um
  source 1..23: mol_type = other RNA
tgaagttctgatgtcagaccttt

SEQ ID NO: 662 - RNA, 23 nt, synthetic construct
  misc_feature 1..23: note = Synthetic: WV-42381
  misc_feature 1..23: note = Synthetic: SSR-0105141
  modified_base 1: mod_base = um
  modified_base 1..2: mod_base = OTHER; note = phosphorothioate
  modified_base 2: mod_base = OTHER; note = 2-fluororibose uracil
  modified_base 2..3: mod_base = OTHER; note = phosphorothioate
  modified_base 3: mod_base = um
  modified_base 4: mod_base = gm
  modified_base 5: mod_base = OTHER; note = 2-O-methylribose adenine
  modified_base 6: mod_base = OTHER; note = 2-fluororibose uracil
  modified_base 7: mod_base = OTHER; note = 2-O-methylribose adenine
  modified_base 8: mod_base = cm
  modified_base 9: mod_base = cm
  modified_base 10: mod_base = OTHER; note = 2-O-methylribose adenine
  modified_base 11: mod_base = gm
  modified_base 12: mod_base = um
  modified_base 13: mod_base = um
  modified_base 14: mod_base = OTHER; note = 2-fluororibose uracil
  modified_base 15: mod_base = um
  modified_base 16: mod_base = OTHER; note = 2-fluororibose uracil
  modified_base 17: mod_base = cm
  modified_base 18: mod_base = cm
  modified_base 19: mod_base = cm
  modified_base 20: mod_base = OTHER; note = 2-O-methylribose adenine
  modified_base 21: mod_base = OTHER; note = 2-O-methylribose adenine
  modified_base 21..22: mod_base = OTHER; note = phosphorothioate
  modified_base 22: mod_base = um
  modified_base 22..23: mod_base = OTHER; note = phosphorothioate
  modified_base 23: mod_base = um
  source 1..23: mol_type = other RNA
tttgataccagtttttcccaatt

SEQ ID NO: 663 - RNA, 23 nt, synthetic construct
  misc_feature 1..23: note = Synthetic: WV-42382
  misc_feature 1..23: note = Synthetic: SSR-0105144
  modified_base 1: mod_base = um
  modified_base 1..2: mod_base = OTHER; note = phosphorothioate
  modified_base 2: mod_base = OTHER; note = 2-fluororibose uracil
  modified_base 2..3: mod_base = OTHER; note = phosphorothioate
  modified_base 3: mod_base = um
  modified_base 4: mod_base = um
  modified_base 5: mod_base = gm
  modified_base 6: mod_base = OTHER; note = 2-fluororibose adenine
  modified_base 7: mod_base = um
  modified_base 8: mod_base = OTHER; note = 2-O-methylribose adenine
  modified_base 9: mod_base = cm
  modified_base 10: mod_base = cm
  modified_base 11: mod_base = OTHER; note = 2-O-methylribose adenine
  modified_base 12: mod_base = gm
  modified_base 13: mod_base = um
  modified_base 14: mod_base = OTHER; note = 2-fluororibose uracil
  modified_base 15: mod_base = um
  modified_base 16: mod_base = OTHER; note = 2-fluororibose uracil
  modified_base 17: mod_base = um
  modified_base 18: mod_base = cm
  modified_base 19: mod_base = cm
  modified_base 20: mod_base = cm
  modified_base 21: mod_base = OTHER; note = 2-O-methylribose adenine
  modified_base 21..22: mod_base = OTHER; note = phosphorothioate
  modified_base 22: mod_base = um
  modified_base 22..23: mod_base = OTHER; note = phosphorothioate
  modified_base 23: mod_base = um
  source 1..23: mol_type = other RNA
ttttgataccagtttttcccatt

SEQ ID NO: 664 - RNA, 23 nt, synthetic construct
  misc_feature 1..23: note = Synthetic: WV-42383
  misc_feature 1..23: note = Synthetic: SSR-0105105
  modified_base 1: mod_base = um
  modified_base 1..2: mod_base = OTHER; note = phosphorothioate
  modified_base 2: mod_base = OTHER; note = 2-fluororibose guanine
  modified_base 2..3: mod_base = OTHER; note = phosphorothioate
  modified_base 3: mod_base = OTHER; note = 2-O-methylribose adenine
  modified_base 4: mod_base = cm
  modified_base 5: mod_base = OTHER; note = 2-O-methylribose adenine
  modified_base 6: mod_base = OTHER; note = 2-fluororibose uracil
  modified_base 7: mod_base = gm
  modified_base 8: mod_base = OTHER; note = 2-O-methylribose adenine
  modified_base 9: mod_base = gm
  modified_base 10: mod_base = gm
  modified_base 11: mod_base = um
  modified_base 12: mod_base = um
  modified_base 13: mod_base = um
  modified_base 14: mod_base = OTHER; note = 2-fluororibose uracil
  modified_base 15: mod_base = gm
  modified_base 16: mod_base = OTHER; note = 2-fluororibose adenine
  modified_base 17: mod_base = um
  modified_base 18: mod_base = OTHER; note = 2-O-methylribose adenine
  modified_base 19: mod_base = cm
  modified_base 20: mod_base = cm
  modified_base 21: mod_base = OTHER; note = 2-O-methylribose adenine
  modified_base 21..22: mod_base = OTHER; note = phosphorothioate
  modified_base 22: mod_base = um
  modified_base 22..23: mod_base = OTHER; note = phosphorothioate
  modified_base 23: mod_base = um
  source 1..23: mol_type = other RNA
tgacatgaggttttgataccatt

SEQ ID NO: 665 - RNA, 23 nt, synthetic construct
  misc_feature 1..23: note = Synthetic: WV-42384
  misc_feature 1..23: note = Synthetic: SSR-0105065
  modified_base 1: mod_base = um
  modified_base 1..2: mod_base = OTHER; note = phosphorothioate
  modified_base 2: mod_base = OTHER; note = 2-fluororibose adenine
  modified_base 2..3: mod_base = OTHER; note = phosphorothioate
  modified_base 3: mod_base = cm
  modified_base 4: mod_base = OTHER; note = 2-O-methylribose adenine
  modified_base 5: mod_base = gm
  modified_base 6: mod_base = OTHER; note = 2-fluororibose guanine
  modified_base 7: mod_base = cm
  modified_base 8: mod_base = cm
  modified_base 9: mod_base = OTHER; note = 2-O-methylribose adenine
  modified_base 10: mod_base = um
  modified_base 11: mod_base = OTHER; note = 2-O-methylribose adenine
  modified_base 12: mod_base = OTHER; note = 2-O-methylribose adenine
  modified_base 13: mod_base = um
  modified_base 14: mod_base = OTHER; note = 2-fluororibose cytosine
  modified_base 15: mod_base = um
  modified_base 16: mod_base = OTHER; note = 2-fluororibose uracil
  modified_base 17: mod_base = gm
  modified_base 18: mod_base = um
  modified_base 19: mod_base = gm
  modified_base 20: mod_base = cm
  modified_base 21: mod_base = um
  modified_base 21..22: mod_base = OTHER; note = phosphorothioate
  modified_base 22: mod_base = um
  modified_base 22..23: mod_base = OTHER; note = phosphorothioate
  modified_base 23: mod_base = um
  source 1..23: mol_type = other RNA
tacaggccataatcttgtgcttt

SEQ ID NO: 666 - RNA, 23 nt, synthetic construct
  misc_feature 1..23: note = Synthetic: WV-42385
  misc_feature 1..23: note = Synthetic: SSR-0105126
  modified_base 1: mod_base = um
  modified_base 1..2: mod_base = OTHER; note = phosphorothioate
  modified_base 2: mod_base = OTHER; note = 2-fluororibose uracil
  modified_base 2..3: mod_base = OTHER; note = phosphorothioate
  modified_base 3: mod_base = OTHER; note = 2-O-methylribose adenine
  modified_base 4: mod_base = cm
  modified_base 5: mod_base = OTHER; note = 2-O-methylribose adenine
  modified_base 6: mod_base = OTHER; note = 2-fluororibose guanine
  modified_base 7: mod_base = gm
  modified_base 8: mod_base = cm
  modified_base 9: mod_base = cm
  modified_base 10: mod_base = OTHER; note = 2-O-methylribose adenine
  modified_base 11: mod_base = um
  modified_base 12: mod_base = OTHER; note = 2-O-methylribose adenine
  modified_base 13: mod_base = OTHER; note = 2-O-methylribose adenine
  modified_base 14: mod_base = OTHER; note = 2-fluororibose uracil
  modified_base 15: mod_base = cm
  modified_base 16: mod_base = OTHER; note = 2-fluororibose uracil
  modified_base 17: mod_base = um
  modified_base 18: mod_base = gm
  modified_base 19: mod_base = um
  modified_base 20: mod_base = gm
  modified_base 21: mod_base = cm
  modified_base 21..22: mod_base = OTHER; note = phosphorothioate
  modified_base 22: mod_base = um
  modified_base 22..23: mod_base = OTHER; note = phosphorothioate
  modified_base 23: mod_base = um
  source 1..23: mol_type = other RNA
ttacaggccataatcttgtgctt

SEQ ID NO: 667 - RNA, 23 nt, synthetic construct
  misc_feature 1..23: note = Synthetic: WV-42386
  misc_feature 1..23: note = Synthetic: SSR-0105093
  modified_base 1: mod_base = um
  modified_base 1..2: mod_base = OTHER; note = phosphorothioate
  modified_base 2: mod_base = OTHER; note = 2-fluororibose cytosine
  modified_base 2..3: mod_base = OTHER; note = phosphorothioate
  modified_base 3: mod_base = cm
  modified_base 4: mod_base = OTHER; note = 2-O-methylribose adenine
  modified_base 5: mod_base = OTHER; note = 2-O-methylribose adenine
  modified_base 6: mod_base = OTHER; note = 2-fluororibose uracil
  modified_base 7: mod_base = OTHER; note = 2-O-methylribose adenine
  modified_base 8: mod_base = cm
  modified_base 9: mod_base = OTHER; note = 2-O-methylribose adenine
  modified_base 10: mod_base = gm
  modified_base 11: mod_base = gm
  modified_base 12: mod_base = cm
  modified_base 13: mod_base = cm
  modified_base 14: mod_base = OTHER; note = 2-fluororibose adenine
  modified_base 15: mod_base = um
  modified_base 16: mod_base = OTHER; note = 2-fluororibose adenine
  modified_base 17: mod_base = OTHER; note = 2-O-methylribose adenine
  modified_base 18: mod_base = um
  modified_base 19: mod_base = cm
  modified_base 20: mod_base = um
  modified_base 21: mod_base = um
  modified_base 21..22: mod_base = OTHER; note = phosphorothioate
  modified_base 22: mod_base = um
  modified_base 22..23: mod_base = OTHER; note = phosphorothioate
  modified_base 23: mod_base = um
  source 1..23: mol_type = other RNA
tccaatacaggccataatctttt

SEQ ID NO: 668 - RNA, 23 nt, synthetic construct
  misc_feature 1..23: note = Synthetic: WV-42387
  misc_feature 1..23: note = Synthetic: SSR-0105099
  modified_base 1: mod_base = um
  modified_base 1..2: mod_base = OTHER; note = phosphorothioate
  modified_base 2: mod_base = OTHER; note = 2-fluororibose cytosine
  modified_base 2..3: mod_base = OTHER; note = phosphorothioate
  modified_base 3: mod_base = um
  modified_base 4: mod_base = um
  modified_base 5: mod_base = cm
  modified_base 6: mod_base = OTHER; note = 2-fluororibose uracil
  modified_base 7: mod_base = um
  modified_base 8: mod_base = OTHER; note = 2-O-methylribose adenine
  modified_base 9: mod_base = cm
  modified_base 10: mod_base = gm
  modified_base 11: mod_base = OTHER; note = 2-O-methylribose adenine
  modified_base 12: mod_base = cm
  modified_base 13: mod_base = um
  modified_base 14: mod_base = OTHER; note = 2-fluororibose uracil
  modified_base 15: mod_base = cm
  modified_base 16: mod_base = OTHER; note = 2-fluororibose adenine
  modified_base 17: mod_base = um
  modified_base 18: mod_base = cm
  modified_base 19: mod_base = um
  modified_base 20: mod_base = gm
  modified_base 21: mod_base = um
  modified_base 21..22: mod_base = OTHER; note = phosphorothioate
  modified_base 22: mod_base = um
  modified_base 22..23: mod_base = OTHER; note = phosphorothioate
  modified_base 23: mod_base = um
  source 1..23: mol_type = other RNA
tcttcttacgacttcatctgttt

SEQ ID NO: 669 - RNA, 23 nt, synthetic construct
  misc_feature 1..23: note = Synthetic: WV-42388
  misc_feature 1..23: note = Synthetic: SSR-0105131
  modified_base 1: mod_base = um
  modified_base 1..2: mod_base = OTHER; note = phosphorothioate
  modified_base 2: mod_base = OTHER; note = 2-fluororibose uracil
  modified_base 2..3: mod_base = OTHER; note = phosphorothioate
  modified_base 3: mod_base = cm
  modified_base 4: mod_base = cm
  modified_base 5: mod_base = OTHER; note = 2-O-methylribose adenine
  modified_base 6: mod_base = OTHER; note = 2-fluororibose uracil
  modified_base 7: mod_base = cm
  modified_base 8: mod_base = um
  modified_base 9: mod_base = OTHER; note = 2-O-methylribose adenine
  modified_base 10: mod_base = um
  modified_base 11: mod_base = cm
  modified_base 12: mod_base = OTHER; note = 2-O-methylribose adenine
  modified_base 13: mod_base = gm
  modified_base 14: mod_base = OTHER; note = 2-fluororibose adenine
  modified_base 15: mod_base = cm
  modified_base 16: mod_base = OTHER; note = 2-fluororibose uracil
  modified_base 17: mod_base = um
  modified_base 18: mod_base = cm
  modified_base 19: mod_base = um
  modified_base 20: mod_base = um
  modified_base 21: mod_base = OTHER; note = 2-O-methylribose adenine
  modified_base 21..22: mod_base = OTHER; note = phosphorothioate
  modified_base 22: mod_base = um
  modified_base 22..23: mod_base = OTHER; note = phosphorothioate
  modified_base 23: mod_base = um
  source 1..23: mol_type = other RNA
ttccatctatcagacttcttatt

SEQ ID NO: 670 - RNA, 23 nt, synthetic construct
  misc_feature 1..23: note = Synthetic: WV-42389
  misc_feature 1..23: note = Synthetic: SSR-0105077
  modified_base 1: mod_base = um
  modified_base 1..2: mod_base = OTHER; note = phosphorothioate
  modified_base 2: mod_base = OTHER; note = 2-fluororibose adenine
  modified_base 2..3: mod_base = OTHER; note = phosphorothioate
  modified_base 3: mod_base = gm
  modified_base 4: mod_base = um
  modified_base 5: mod_base = OTHER; note = 2-O-methylribose adenine
  modified_base 6: mod_base = OTHER; note = 2-fluororibose uracil
  modified_base 7: mod_base = um
  modified_base 8: mod_base = cm
  modified_base 9: mod_base = cm
  modified_base 10: mod_base = OTHER; note = 2-O-methylribose adenine
  modified_base 11: mod_base = um
  modified_base 12: mod_base = cm
  modified_base 13: mod_base = um
  modified_base 14: mod_base = OTHER; note = 2-fluororibose adenine
  modified_base 15: mod_base = um
  modified_base 16: mod_base = OTHER; note = 2-fluororibose cytosine
  modified_base 17: mod_base = OTHER; note = 2-O-methylribose adenine
  modified_base 18: mod_base = gm
  modified_base 19: mod_base = OTHER; note = 2-O-methylribose adenine
  modified_base 20: mod_base = cm
  modified_base 21: mod_base = um
  modified_base 21..22: mod_base = OTHER; note = phosphorothioate
  modified_base 22: mod_base = um
  modified_base 22..23: mod_base = OTHER; note = phosphorothioate
  modified_base 23: mod_base = um
  source 1..23: mol_type = other RNA
tagtattccatctatcagacttt

SEQ ID NO: 671 - RNA, 23 nt, synthetic construct
  misc_feature 1..23: note = Synthetic: WV-42390
  misc_feature 1..23: note = Synthetic: SSR-0105060
  modified_base 1: mod_base = um
  modified_base 1..2: mod_base = OTHER; note = phosphorothioate
  modified_base 2: mod_base = OTHER; note = 2-fluororibose adenine
  modified_base 2..3: mod_base = OTHER; note = phosphorothioate
  modified_base 3: mod_base = OTHER; note = 2-O-methylribose adenine
  modified_base 4: mod_base = gm
  modified_base 5: mod_base = um
  modified_base 6: mod_base = OTHER; note = 2-fluororibose adenine
  modified_base 7: mod_base = um
  modified_base 8: mod_base = um
  modified_base 9: mod_base = cm
  modified_base 10: mod_base = cm
  modified_base 11: mod_base = OTHER; note = 2-O-methylribose adenine
  modified_base 12: mod_base = um
  modified_base 13: mod_base = cm
  modified_base 14: mod_base = OTHER; note = 2-fluororibose uracil
  modified_base 15: mod_base = OTHER; note = 2-O-methylribose adenine
  modified_base 16: mod_base = OTHER; note = 2-fluororibose uracil
  modified_base 17: mod_base = cm
  modified_base 18: mod_base = OTHER; note = 2-O-methylribose adenine
  modified_base 19: mod_base = gm
  modified_base 20: mod_base = OTHER; note = 2-O-methylribose adenine
  modified_base 21: mod_base = cm
  modified_base 21..22: mod_base = OTHER; note = phosphorothioate
  modified_base 22: mod_base = um
  modified_base 22..23: mod_base = OTHER; note = phosphorothioate
  modified_base 23: mod_base = um
  source 1..23: mol_type = other RNA
taagtattccatctatcagactt

SEQ ID NO: 672 - RNA, 23 nt, synthetic construct
  misc_feature 1..23: note = Synthetic: WV-42391
  misc_feature 1..23: note = Synthetic: SSR-0105085
  modified_base 1: mod_base = um
  modified_base 1..2: mod_base = OTHER; note = phosphorothioate
  modified_base 2: mod_base = OTHER; note = 2-fluororibose adenine
  modified_base 2..3: mod_base = OTHER; note = phosphorothioate
  modified_base 3: mod_base = um
  modified_base 4: mod_base = um
  modified_base 5: mod_base = gm
  modified_base 6: mod_base = OTHER; note = 2-fluororibose guanine
  modified_base 7: mod_base = um
  modified_base 8: mod_base = OTHER; note = 2-O-methylribose adenine
  modified_base 9: mod_base = OTHER; note = 2-O-methylribose adenine
  modified_base 10: mod_base = gm
  modified_base 11: mod_base = um
  modified_base 12: mod_base = OTHER; note = 2-O-methylribose adenine
  modified_base 13: mod_base = um
  modified_base 14: mod_base = OTHER; note = 2-fluororibose uracil
  modified_base 15: mod_base = cm
  modified_base 16: mod_base = OTHER; note = 2-fluororibose cytosine
  modified_base 17: mod_base = OTHER; note = 2-O-methylribose adenine
  modified_base 18: mod_base = um
  modified_base 19: mod_base = cm
  modified_base 20: mod_base = um
  modified_base 21: mod_base = OTHER; note = 2-O-methylribose adenine
  modified_base 21..22: mod_base = OTHER; note = phosphorothioate
  modified_base 22: mod_base = um
  modified_base 22..23: mod_base = OTHER; note = phosphorothioate
  modified_base 23: mod_base = um
  source 1..23: mol_type = other RNA
tattggtaagtattccatctatt

SEQ ID NO: 673 - RNA, 23 nt, synthetic construct
  misc_feature 1..23: note = Synthetic: WV-42392
  misc_feature 1..23: note = Synthetic: SSR-0105130
  modified_base 1: mod_base = um
  modified_base 1..2: mod_base = OTHER; note = phosphorothioate
  modified_base 2: mod_base = OTHER; note = 2-fluororibose uracil
  modified_base 2..3: mod_base = OTHER; note = phosphorothioate
  modified_base 3: mod_base = OTHER; note = 2-O-methylribose adenine
  modified_base 4: mod_base = um
  modified_base 5: mod_base = um
  modified_base 6: mod_base = OTHER; note = 2-fluororibose guanine
  modified_base 7: mod_base = gm
  modified_base 8: mod_base = um
  modified_base 9: mod_base = OTHER; note = 2-O-methylribose adenine
  modified_base 10: mod_base = OTHER; note = 2-O-methylribose adenine
  modified_base 11: mod_base = gm
  modified_base 12: mod_base = um
  modified_base 13: mod_base = OTHER; note = 2-O-methylribose adenine
  modified_base 14: mod_base = OTHER; note = 2-fluororibose uracil
  modified_base 15: mod_base = um
  modified_base 16: mod_base = OTHER; note = 2-fluororibose cytosine
  modified_base 17: mod_base = cm
  modified_base 18: mod_base = OTHER; note = 2-O-methylribose adenine
  modified_base 19: mod_base = um
  modified_base 20: mod_base = cm
  modified_base 21: mod_base = um
  modified_base 21..22: mod_base = OTHER; note = phosphorothioate
  modified_base 22: mod_base = um
  modified_base 22..23: mod_base = OTHER; note = phosphorothioate
  modified_base 23: mod_base = um
  source 1..23: mol_type = other RNA
ttattggtaagtattccatcttt

SEQ ID NO: 674 - RNA, 23 nt, synthetic construct
  misc_feature 1..23: note = Synthetic: WV-42393
  misc_feature 1..23: note = Synthetic: SSR-0105098
  modified_base 1: mod_base = um
  modified_base 1..2: mod_base = OTHER; note = phosphorothioate
  modified_base 2: mod_base = OTHER; note = 2-fluororibose cytosine
  modified_base 2..3: mod_base = OTHER; note = phosphorothioate
  modified_base 3: mod_base = um
  modified_base 4: mod_base = um
  modified_base 5: mod_base = OTHER; note = 2-O-methylribose adenine
  modified_base 6: mod_base = OTHER; note = 2-fluororibose uracil
  modified_base 7: mod_base = um
  modified_base 8: mod_base = gm
  modified_base 9: mod_base = gm
  modified_base 10: mod_base = um
  modified_base 11: mod_base = OTHER; note = 2-O-methylribose adenine
  modified_base 12: mod_base = OTHER; note = 2-O-methylribose adenine
  modified_base 13: mod_base = gm
  modified_base 14: mod_base = OTHER; note = 2-fluororibose uracil
  modified_base 15: mod_base = OTHER; note = 2-O-methylribose adenine
  modified_base 16: mod_base = OTHER; note = 2-fluororibose uracil
  modified_base 17: mod_base = um
  modified_base 18: mod_base = cm
  modified_base 19: mod_base = cm
  modified_base 20: mod_base = OTHER; note = 2-O-methylribose adenine
  modified_base 21: mod_base = um
  modified_base 21..22: mod_base = OTHER; note = phosphorothioate
  modified_base 22: mod_base = um
  modified_base 22..23: mod_base = OTHER; note = phosphorothioate
  modified_base 23: mod_base = um
  source 1..23: mol_type = other RNA
tcttattggtaagtattccattt

SEQ ID NO: 675 - RNA, 23 nt, synthetic construct
  misc_feature 1..23: note = Synthetic: WV-42394
  misc_feature 1..23: note = Synthetic: SSR-0105134
  modified_base 1: mod_base = um
  modified_base 1..2: mod_base = OTHER; note = phosphorothioate
  modified_base 2: mod_base = OTHER; note = 2-fluororibose uracil
  modified_base 2..3: mod_base = OTHER; note = phosphorothioate
  modified_base 3: mod_base = cm
  modified_base 4: mod_base = um
  modified_base 5: mod_base = um
  modified_base 6: mod_base = OTHER; note = 2-fluororibose adenine
  modified_base 7: mod_base = um
  modified_base 8: mod_base = um
  modified_base 9: mod_base = gm
  modified_base 10: mod_base = gm
  modified_base 11: mod_base = um
  modified_base 12: mod_base = OTHER; note = 2-O-methylribose adenine
  modified_base 13: mod_base = OTHER; note = 2-O-methylribose adenine
  modified_base 14: mod_base = OTHER; note = 2-fluororibose guanine
  modified_base 15: mod_base = um
  modified_base 16: mod_base = OTHER; note = 2-fluororibose adenine
  modified_base 17: mod_base = um
  modified_base 18: mod_base = um
  modified_base 19: mod_base = cm
  modified_base 20: mod_base = cm
  modified_base 21: mod_base = OTHER; note = 2-O-methylribose adenine
  modified_base 21..22: mod_base = OTHER; note = phosphorothioate
  modified_base 22: mod_base = um
  modified_base 22..23: mod_base = OTHER; note = phosphorothioate
  modified_base 23: mod_base = um
  source 1..23: mol_type = other RNA
ttcttattggtaagtattccatt

SEQ ID NO: 676 - RNA, 23 nt, synthetic construct
  misc_feature 1..23: note = Synthetic: WV-42395
  misc_feature 1..23: note = Synthetic: SSR-0105055
  modified_base 1: mod_base = um
  modified_base 1..2: mod_base = OTHER; note = phosphorothioate
  modified_base 2: mod_base = OTHER; note = 2-fluororibose adenine
  modified_base 2..3: mod_base = OTHER; note = phosphorothioate
  modified_base 3: mod_base = OTHER; note = 2-O-methylribose adenine
  modified_base 4: mod_base = OTHER; note = 2-O-methylribose adenine
  modified_base 5: mod_base = OTHER; note = 2-O-methylribose adenine
  modified_base 6: mod_base = OTHER; note = 2-fluororibose uracil
  modified_base 7: mod_base = cm
  modified_base 8: mod_base = OTHER; note = 2-O-methylribose adenine
  modified_base 9: mod_base = um
  modified_base 10: mod_base = um
  modified_base 11: mod_base = um
  modified_base 12: mod_base = um
  modified_base 13: mod_base = cm
  modified_base 14: mod_base = OTHER; note = 2-fluororibose uracil
  modified_base 15: mod_base = um
  modified_base 16: mod_base = OTHER; note = 2-fluororibose adenine
  modified_base 17: mod_base = um
  modified_base 18: mod_base = um
  modified_base 19: mod_base = gm
  modified_base 20: mod_base = gm
  modified_base 21: mod_base = um
  modified_base 21..22: mod_base = OTHER; note = phosphorothioate
  modified_base 22: mod_base = um
  modified_base 22..23: mod_base = OTHER; note = phosphorothioate
  modified_base 23: mod_base = um
  source 1..23: mol_type = other RNA
taaaatcattttcttattggttt

SEQ ID NO: 677 - RNA, 23 nt, synthetic construct
  misc_feature 1..23: note = Synthetic: WV-42396
  misc_feature 1..23: note = Synthetic: SSR-0105069
  modified_base 1: mod_base = um
  modified_base 1..2: mod_base = OTHER; note = phosphorothioate
  modified_base 2: mod_base = OTHER; note = 2-fluororibose adenine
  modified_base 2..3: mod_base = OTHER; note = phosphorothioate
  modified_base 3: mod_base = gm
  modified_base 4: mod_base = OTHER; note = 2-O-methylribose adenine
  modified_base 5: mod_base = gm
  modified_base 6: mod_base = OTHER; note = 2-fluororibose uracil
  modified_base 7: mod_base = um
  modified_base 8: mod_base = gm
  modified_base 9: mod_base = cm
  modified_base 10: mod_base = OTHER; note = 2-O-methylribose adenine
  modified_base 11: mod_base = cm
  modified_base 12: mod_base = cm
  modified_base 13: mod_base = gm
  modified_base 14: mod_base = OTHER; note = 2-fluororibose uracil
  modified_base 15: mod_base = um
  modified_base 16: mod_base = OTHER; note = 2-fluororibose uracil
  modified_base 17: mod_base = um
  modified_base 18: mod_base = gm
  modified_base 19: mod_base = gm
  modified_base 20: mod_base = gm
  modified_base 21: mod_base = cm
  modified_base 21..22: mod_base = OTHER; note = phosphorothioate
  modified_base 22: mod_base = um
  modified_base 22..23: mod_base = OTHER; note = phosphorothioate
  modified_base 23: mod_base = um
  source 1..23: mol_type = other RNA
tagagttgcaccgttttgggctt

SEQ ID NO: 678 - RNA, 23 nt, synthetic construct
  misc_feature 1..23: note = Synthetic: WV-42397
  misc_feature 1..23: note = Synthetic: SSR-0105078
  modified_base 1: mod_base = um
  modified_base 1..2: mod_base = OTHER; note = phosphorothioate
  modified_base 2: mod_base = OTHER; note = 2-fluororibose adenine
  modified_base 2..3: mod_base = OTHER; note = phosphorothioate
  modified_base 3: mod_base = gm
  modified_base 4: mod_base = um
  modified_base 5: mod_base = cm
  modified_base 6: mod_base = OTHER; note = 2-fluororibose cytosine
  modified_base 7: mod_base = OTHER; note = 2-O-methylribose adenine
  modified_base 8: mod_base = gm
  modified_base 9: mod_base = OTHER; note = 2-O-methylribose adenine
  modified_base 10: mod_base = OTHER; note = 2-O-methylribose adenine
  modified_base 11: mod_base = um
  modified_base 12: mod_base = OTHER; note = 2-O-methylribose adenine
  modified_base 13: mod_base = gm
  modified_base 14: mod_base = OTHER; note = 2-fluororibose adenine
  modified_base 15: mod_base = gm
  modified_base 16: mod_base = OTHER; note = 2-fluororibose uracil
  modified_base 17: mod_base = um
  modified_base 18: mod_base = gm
  modified_base 19: mod_base = cm
  modified_base 20: mod_base = OTHER; note = 2-O-methylribose adenine
  modified_base 21: mod_base = cm
  modified_base 21..22: mod_base = OTHER; note = phosphorothioate
  modified_base 22: mod_base = um
  modified_base 22..23: mod_base = OTHER; note = phosphorothioate
  modified_base 23: mod_base = um
  source 1..23: mol_type = other RNA
tagtccagaatagagttgcactt

SEQ ID NO: 679 - RNA, 21 nt, synthetic construct
  misc_feature 1..21: note = Synthetic: WV-42398
  misc_feature 1..21: note = Synthetic: SSR-0101601
  modified_base 1: mod_base = OTHER; note = triantennary GalNAc with C12 linker linked to 6-aminohexanol linked by phosphate to the 5' end of 2-O-methylribose adenine
  modified_base 1..2: mod_base = OTHER; note = phosphorothioate
  modified_base 2: mod_base = gm
  modified_base 3: mod_base = OTHER; note = 2-O-methylribose adenine
  modified_base 4: mod_base = gm
  modified_base 5: mod_base = cm
  modified_base 6: mod_base = OTHER; note = 2-O-methylribose adenine
  modified_base 7: mod_base = OTHER; note = 2-fluororibose adenine
  modified_base 8: mod_base = OTHER; note = 2-O-methylribose adenine
  modified_base 9: mod_base = OTHER; note = 2-fluororibose guanine
  modified_base 10: mod_base = OTHER; note = 2-fluororibose cytosine
  modified_base 11: mod_base = OTHER; note = 2-fluororibose cytosine
  modified_base 12: mod_base = OTHER; note = 2-O-methylribose adenine
  modified_base 13: mod_base = um
  modified_base 14: mod_base = gm
  modified_base 15: mod_base = OTHER; note = 2-O-methylribose adenine
  modified_base 16: mod_base = OTHER; note = 2-O-methylribose adenine
  modified_base 17: mod_base = cm
  modified_base 18: mod_base = OTHER; note = 2-O-methylribose adenine
  modified_base 19: mod_base = um
  modified_base 20: mod_base = cm
  modified_base 20..21: mod_base = OTHER; note = phosphorothioate
  modified_base 21: mod_base = OTHER; note = 2-O-methylribose adenine
  source 1..21: mol_type = other RNA
agagcaaagccatgaacatca

SEQ ID NO: 680 - RNA, 21 nt, synthetic construct
  misc_feature 1..21: note = Synthetic: WV-42399
  misc_feature 1..21: note = Synthetic: SSR-0101602
  modified_base 1: mod_base = OTHER; note = triantennary GalNAc with C12 linker linked to 6-aminohexanol linked by phosphate to the 5' end of 2-O-methylribose adenine
  modified_base 1..2: mod_base = OTHER; note = phosphorothioate
  modified_base 2: mod_base = OTHER; note = 2-O-methylribose adenine
  modified_base 3: mod_base = OTHER; note = 2-O-methylribose adenine
  modified_base 4: mod_base = gm
  modified_base 5: mod_base = cm
  modified_base 6: mod_base = cm
  modified_base 7: mod_base = OTHER; note = 2-fluororibose adenine
  modified_base 8: mod_base = um
  modified_base 9: mod_base = OTHER; note = 2-fluororibose guanine
  modified_base 10: mod_base = OTHER; note = 2-fluororibose adenine
  modified_base 11: mod_base = OTHER; note = 2-fluororibose adenine
  modified_base 12: mod_base = cm
  modified_base 13: mod_base = OTHER; note = 2-O-methylribose adenine
  modified_base 14: mod_base = um
  modified_base 15: mod_base = cm
  modified_base 16: mod_base = OTHER; note = 2-O-methylribose adenine
  modified_base 17: mod_base = um
  modified_base 18: mod_base = cm
  modified_base 19: mod_base = cm
  modified_base 20: mod_base = um
  modified_base 20..21: mod_base = OTHER; note = phosphorothioate
  modified_base 21: mod_base = OTHER; note = 2-O-methylribose adenine
  source 1..21: mol_type = other RNA
aaagccatgaacatcatccta

SEQ ID NO: 681 - RNA, 21 nt, synthetic construct
  misc_feature 1..21: note = Synthetic: WV-42400
  misc_feature 1..21: note = Synthetic: SSR-0101603
  modified_base 1: mod_base = OTHER; note = triantennary GalNAc with C12 linker linked to 6-aminohexanol linked by phosphate to the 5' end of 2-O-methylribose cytosine
  modified_base 1..2: mod_base = OTHER; note = phosphorothioate
  modified_base 2: mod_base = OTHER; note = 2-O-methylribose adenine
  modified_base 3: mod_base = um
  modified_base 4: mod_base = gm
  modified_base 5: mod_base = OTHER; note = 2-O-methylribose adenine
  modified_base 6: mod_base = OTHER; note = 2-O-methylribose adenine
  modified_base 7: mod_base = OTHER; note = 2-fluororibose cytosine
  modified_base 8: mod_base = OTHER; note = 2-O-methylribose adenine
  modified_base 9: mod_base = OTHER; note = 2-fluororibose uracil
  modified_base 10: mod_base = OTHER; note = 2-fluororibose cytosine
  modified_base 11: mod_base = OTHER; note = 2-fluororibose adenine
  modified_base 12: mod_base = um
  modified_base 13: mod_base = cm
  modified_base 14: mod_base = cm
  modified_base 15: mod_base = um
  modified_base 16: mod_base = OTHER; note = 2-O-methylribose adenine
  modified_base 17: mod_base = gm
  modified_base 18: mod_base = OTHER; note = 2-O-methylribose adenine
  modified_base 19: mod_base = OTHER; note = 2-O-methylribose adenine
  modified_base 20: mod_base = OTHER; note = 2-O-methylribose adenine
  modified_base 20..21: mod_base = OTHER; note = phosphorothioate
  modified_base 21: mod_base = OTHER; note = 2-O-methylribose adenine
  source 1..21: mol_type = other RNA
catgaacatcatcctagaaaa

SEQ ID NO: 682 - RNA, 21 nt, synthetic construct
  misc_feature 1..21: note = Synthetic: WV-42401
  misc_feature 1..21: note = Synthetic: SSR-0101604
  modified_base 1: mod_base = OTHER; note = triantennary GalNAc with C12 linker linked to 6-aminohexanol linked by phosphate to the 5' end of 2-O-methylribose adenine
  modified_base 1..2: mod_base = OTHER; note = phosphorothioate
  modified_base 2: mod_base = OTHER; note = 2-O-methylribose adenine
  modified_base 3: mod_base = cm
  modified_base 4: mod_base = OTHER; note = 2-O-methylribose adenine
  modified_base 5: mod_base = um
  modified_base 6: mod_base = cm
  modified_base 7: mod_base = OTHER; note = 2-fluororibose adenine
  modified_base 8: mod_base = um
  modified_base 9: mod_base = OTHER; note = 2-fluororibose cytosine
  modified_base 10: mod_base = OTHER; note = 2-fluororibose cytosine
  modified_base 11: mod_base = OTHER; note = 2-fluororibose uracil
  modified_base 12: mod_base = OTHER; note = 2-O-methylribose adenine
  modified_base 13: mod_base = gm
  modified_base 14: mod_base = OTHER; note = 2-O-methylribose adenine
  modified_base 15: mod_base = OTHER; note = 2-O-methylribose adenine
  modified_base 16: mod_base = OTHER; note = 2-O-methylribose adenine
  modified_base 17: mod_base = um
  modified_base 18: mod_base = cm
  modified_base 19: mod_base = cm
  modified_base 20: mod_base = um
  modified_base 20..21: mod_base = OTHER; note = phosphorothioate
  modified_base 21: mod_base = OTHER; note = 2-O-methylribose adenine
  source 1..21: mol_type = other RNA
aacatcatcctagaaatccta

SEQ ID NO: 683 - RNA, 21 nt, synthetic construct
  misc_feature 1..21: note = Synthetic: WV-42402
  misc_feature 1..21: note = Synthetic: SSR-0101605
  modified_base 1: mod_base = OTHER; note = triantennary GalNAc with C12 linker linked to 6-aminohexanol linked by phosphate to the 5' end of 2-O-methylribose adenine
  modified_base 1..2: mod_base = OTHER; note = phosphorothioate
  modified_base 2: mod_base = um
  modified_base 3: mod_base = cm
  modified_base 4: mod_base = cm
  modified_base 5: mod_base = um
  modified_base 6: mod_base = OTHER; note = 2-O-methylribose adenine
  modified_base 7: mod_base = OTHER; note = 2-fluororibose guanine
  modified_base 8: mod_base = OTHER; note = 2-O-methylribose adenine
  modified_base 9: mod_base = OTHER; note = 2-fluororibose adenine
  modified_base 10: mod_base = OTHER; note = 2-fluororibose adenine
  modified_base 11: mod_base = OTHER; note = 2-fluororibose uracil
  modified_base 12: mod_base = cm
  modified_base 13: mod_base = cm
  modified_base 14: mod_base = um
  modified_base 15: mod_base = um
  modified_base 16: mod_base = cm
  modified_base 17: mod_base = um
  modified_base 18: mod_base = gm
  modified_base 19: mod_base = cm
  modified_base 20: mod_base = um
  modified_base 20..21: mod_base = OTHER; note = phosphorothioate
  modified_base 21: mod_base = OTHER; note = 2-O-methylribose adenine
  source 1..21: mol_type = other RNA
atcctagaaatccttctgcta

SEQ ID NO: 684 - RNA, 21 nt, synthetic construct
  misc_feature 1..21: note = Synthetic: WV-42403
  misc_feature 1..21: note = Synthetic: SSR-0101606
  modified_base 1: mod_base = OTHER; note = triantennary GalNAc with C12 linker linked to 6-aminohexanol linked by phosphate to the 5' end of 2-O-methylribose cytosine
  modified_base 1..2: mod_base = OTHER; note = phosphorothioate
  modified_base 2: mod_base = cm
  modified_base 3: mod_base = um
  modified_base 4: mod_base = OTHER; note = 2-O-methylribose adenine
  modified_base 5: mod_base = gm
  modified_base 6: mod_base = OTHER; note = 2-O-methylribose adenine
  modified_base 7: mod_base = OTHER; note = 2-fluororibose adenine
  modified_base 8: mod_base = OTHER; note = 2-O-methylribose adenine
  modified_base 9: mod_base = OTHER; note = 2-fluororibose uracil
  modified_base 10: mod_base = OTHER; note = 2-fluororibose cytosine
  modified_base 11: mod_base = OTHER; note = 2-fluororibose cytosine
  modified_base 12: mod_base = um
  modified_base 13: mod_base = um
  modified_base 14: mod_base = cm
  modified_base 15: mod_base = um
  modified_base 16: mod_base = gm
  modified_base 17: mod_base = cm
  modified_base 18: mod_base = um
  modified_base 19: mod_base = um
  modified_base 20: mod_base = cm
  modified_base 20..21: mod_base = OTHER; note = phosphorothioate
  modified_base 21: mod_base = OTHER; note = 2-O-methylribose adenine
  source 1..21: mol_type = other RNA
cctagaaatccttctgcttca

SEQ ID NO: 685 - RNA, 21 nt, synthetic construct
  misc_feature 1..21: note = Synthetic: WV-42404
  misc_feature 1..21: note = Synthetic: SSR-0101607
  modified_base 1: mod_base = OTHER; note = triantennary GalNAc with C12 linker linked to 6-aminohexanol linked by phosphate to the 5' end of 2-O-methylribose cytosine
  modified_base 1..2: mod_base = OTHER; note = phosphorothioate
  modified_base 2: mod_base = um
  modified_base 3: mod_base = gm
  modified_base 4: mod_base = cm
  modified_base 5: mod_base = um
  modified_base 6: mod_base = um
  modified_base 7: mod_base = OTHER; note = 2-fluororibose cytosine
  modified_base 8: mod_base = um
  modified_base 9: mod_base = OTHER; note = 2-fluororibose guanine
  modified_base 10: mod_base = OTHER; note = 2-fluororibose adenine
  modified_base 11: mod_base = OTHER; note = 2-fluororibose uracil
  modified_base 12: mod_base = cm
  modified_base 13: mod_base = OTHER; note = 2-O-methylribose adenine
  modified_base 14: mod_base = cm
  modified_base 15: mod_base = cm
  modified_base 16: mod_base = OTHER; note = 2-O-methylribose adenine
  modified_base 17: mod_base = um
  modified_base 18: mod_base = cm
  modified_base 19: mod_base = OTHER; note = 2-O-methylribose adenine
  modified_base 20: mod_base = um
  modified_base 20..21: mod_base = OTHER; note = phosphorothioate
  modified_base 21: mod_base = OTHER; note = 2-O-methylribose adenine
  source 1..21: mol_type = other RNA
ctgcttctgatcaccatcata

SEQ ID NO: 686 - RNA, 21 nt, synthetic construct
  misc_feature 1..21: note = Synthetic: WV-42405
  misc_feature 1..21: note = Synthetic: SSR-0101608
  modified_base 1: mod_base = OTHER; note = triantennary GalNAc with C12 linker linked to 6-aminohexanol linked by phosphate to the 5' end of 2-O-methylribose guanine
  modified_base 1..2: mod_base = OTHER; note = phosphorothioate
  modified_base 2: mod_base = cm
  modified_base 3: mod_base = um
  modified_base 4: mod_base = um
  modified_base 5: mod_base = cm
  modified_base 6: mod_base = um
  modified_base 7: mod_base = OTHER; note = 2-fluororibose guanine
  modified_base 8: mod_base = OTHER; note = 2-O-methylribose adenine
  modified_base 9: mod_base = OTHER; note = 2-fluororibose uracil
  modified_base 10: mod_base = OTHER; note = 2-fluororibose cytosine
  modified_base 11: mod_base = OTHER; note = 2-fluororibose adenine
  modified_base 12: mod_base = cm
  modified_base 13: mod_base = cm
  modified_base 14: mod_base = OTHER; note = 2-O-methylribose adenine
  modified_base 15: mod_base = um
  modified_base 16: mod_base = cm
  modified_base 17: mod_base = OTHER; note = 2-O-methylribose adenine
  modified_base 18: mod_base = um
  modified_base 19: mod_base = cm
  modified_base 20: mod_base = um
  modified_base 20..21: mod_base = OTHER; note = phosphorothioate
  modified_base 21: mod_base = OTHER; note = 2-O-methylribose adenine
  source 1..21: mol_type = other RNA
gcttctgatcaccatcatcta

SEQ ID NO: 687 - RNA, 21 nt, synthetic construct
  misc_feature 1..21: note = Synthetic: WV-42406
  misc_feature 1..21: note = Synthetic: SSR-0101609
  modified_base 1: mod_base = OTHER; note = triantennary GalNAc with C12 linker linked to 6-aminohexanol linked by phosphate to the 5' end of 2-O-methylribose guanine
  modified_base 1..2: mod_base = OTHER; note = phosphorothioate
  modified_base 2: mod_base = gm
  modified_base 3: mod_base = gm
  modified_base 4: mod_base = gm
  modified_base 5: mod_base = OTHER; note = 2-O-methylribose adenine
  modified_base 6: mod_base = gm
  modified_base 7: mod_base = OTHER; note = 2-fluororibose adenine
  modified_base 8: mod_base = um
  modified_base 9: mod_base = OTHER; note = 2-fluororibose uracil
  modified_base 10: mod_base = OTHER; note = 2-fluororibose guanine
  modified_base 11: mod_base = OTHER; note = 2-fluororibose uracil
  modified_base 12: mod_base = um
  modified_base 13: mod_base = cm
  modified_base 14: mod_base = um
  modified_base 15: mod_base = cm
  modified_base 16: mod_base = OTHER; note = 2-O-methylribose adenine
  modified_base 17: mod_base = um
  modified_base 18: mod_base = um
  modified_base 19: mod_base = OTHER; note = 2-O-methylribose adenine
  modified_base 20: mod_base = cm
  modified_base 20..21: mod_base = OTHER; note = phosphorothioate
  modified_base 21: mod_base = OTHER; note = 2-O-methylribose adenine
  source 1..21: mol_type = other RNA
ggggagattgttctcattaca

SEQ ID NO: 688 - RNA, 21 nt, synthetic construct
  misc_feature 1..21: note = Synthetic: WV-42407
  misc_feature 1..21: note = Synthetic: SSR-0101610
  modified_base 1: mod_base = OTHER; note = triantennary GalNAc with C12 linker linked to 6-aminohexanol linked by phosphate to the 5' end of 2-O-methylribose guanine
  modified_base 1..2: mod_base = OTHER; note = phosphorothioate
  modified_base 2: mod_base = gm
  modified_base 3: mod_base = gm
  modified_base 4: mod_base = OTHER; note = 2-O-methylribose adenine
  modified_base 5: mod_base = gm
  modified_base 6: mod_base = OTHER; note = 2-O-methylribose adenine
  modified_base 7: mod_base = OTHER; note = 2-fluororibose uracil
  modified_base 8: mod_base = um
  modified_base 9: mod_base = OTHER; note = 2-fluororibose guanine
  modified_base 10: mod_base = OTHER; note = 2-fluororibose uracil
  modified_base 11: mod_base = OTHER; note = 2-fluororibose uracil
  modified_base 12: mod_base = cm
  modified_base 13: mod_base = um
  modified_base 14: mod_base = cm
  modified_base 15: mod_base = OTHER; note = 2-O-methylribose adenine
  modified_base 16: mod_base = um
  modified_base 17: mod_base = um
  modified_base 18: mod_base = OTHER; note = 2-O-methylribose adenine
  modified_base 19: mod_base = cm
  modified_base 20: mod_base = um
  modified_base 20..21: mod_base = OTHER; note = phosphorothioate
  modified_base 21: mod_base = OTHER; note = 2-O-methylribose adenine
  source 1..21: mol_type = other RNA
gggagattgttctcattacta

SEQ ID NO: 689 - RNA, 21 nt, synthetic construct
  misc_feature 1..21: note = Synthetic: WV-42408
  misc_feature 1..21: note = Synthetic: SSR-0101611
  modified_base 1: mod_base = OTHER; note = triantennary GalNAc with C12 linker linked to 6-aminohexanol linked by phosphate to the 5' end of 2-O-methylribose adenine
  modified_base 1..2: mod_base = OTHER; note = phosphorothioate
  modified_base 2: mod_base = OTHER; note = 2-O-methylribose adenine
  modified_base 3: mod_base = OTHER; note = 2-O-methylribose adenine
  modified_base 4: mod_base = gm
  modified_base 5: mod_base = OTHER; note = 2-O-methylribose adenine
  modified_base 6: mod_base = OTHER; note = 2-O-methylribose adenine
  modified_base 7: mod_base = OTHER; note = 2-fluororibose guanine
  modified_base 8: mod_base = um
  modified_base 9: mod_base = OTHER; note = 2-fluororibose guanine
  modified_base 10: mod_base = OTHER; note = 2-fluororibose guanine
  modified_base 11: mod_base = OTHER; note = 2-fluororibose guanine
  modified_base 12: mod_base = um
  modified_base 13: mod_base = gm
  modified_base 14: mod_base = OTHER; note = 2-O-methylribose adenine
  modified_base 15: mod_base = um
  modified_base 16: mod_base = gm
  modified_base 17: mod_base = um
  modified_base 18: mod_base = OTHER; note = 2-O-methylribose adenine
  modified_base 19: mod_base = OTHER; note = 2-O-methylribose adenine
  modified_base 20: mod_base = cm
  modified_base 20..21: mod_base = OTHER; note = phosphorothioate
  modified_base 21: mod_base = OTHER; note = 2-O-methylribose adenine
  source 1..21: mol_type = other RNA
aaagaagtgggtgatgtaaca

SEQ ID NO: 690 - RNA, 21 nt, synthetic construct
  misc_feature 1..21: note = Synthetic: WV-42409
  misc_feature 1..21: note = Synthetic: SSR-0101612
  modified_base 1: mod_base = OTHER; note = triantennary GalNAc with C12 linker linked to 6-aminohexanol linked by phosphate to the 5' end of 2-O-methylribose guanine
  modified_base 1..2: mod_base = OTHER; note = phosphorothioate
  modified_base 2: mod_base = um
  modified_base 3: mod_base = gm
  modified_base 4: mod_base = OTHER; note = 2-O-methylribose adenine
  modified_base 5: mod_base = um
  modified_base 6: mod_base = gm
  modified_base 7: mod_base = OTHER; note = 2-fluororibose uracil
  modified_base 8: mod_base = OTHER; note = 2-O-methylribose adenine
  modified_base 9: mod_base = OTHER; note = 2-fluororibose adenine
  modified_base 10: mod_base = OTHER; note = 2-fluororibose cytosine
  modified_base 11: mod_base = OTHER; note = 2-fluororibose adenine
  modified_base 12: mod_base = OTHER; note = 2-O-methylribose adenine
  modified_base 13: mod_base = um
  modified_base 14: mod_base = cm
  modified_base 15: mod_base = gm
  modified_base 16: mod_base = um
  modified_base 17: mod_base = gm
  modified_base 18: mod_base = gm
  modified_base 19: mod_base = um
  modified_base 20: mod_base = gm
  modified_base 20..21: mod_base = OTHER; note = phosphorothioate
  modified_base 21: mod_base = OTHER; note = 2-O-methylribose adenine
  source 1..21: mol_type = other RNA
gtgatgtaacaatcgtggtga

SEQ ID NO: 691 - RNA, 21 nt, synthetic construct
  misc_feature 1..21: note = Synthetic: WV-42410
  misc_feature 1..21: note = Synthetic: SSR-0101613
  modified_base 1: mod_base = OTHER; note = triantennary GalNAc with C12 linker linked to 6-aminohexanol linked by phosphate to the 5' end of 2-O-methylribose uracil
  modified_base 1..2: mod_base = OTHER; note = phosphorothioate
  modified_base 2: mod_base = gm
  modified_base 3: mod_base = um
  modified_base 4: mod_base = OTHER; note = 2-O-methylribose adenine
  modified_base 5: mod_base = OTHER; note = 2-O-methylribose adenine
  modified_base 6: mod_base = cm
  modified_base 7: mod_base = OTHER; note = 2-fluororibose adenine
  modified_base 8: mod_base = OTHER; note = 2-O-methylribose adenine
  modified_base 9: mod_base = OTHER; note = 2-fluororibose uracil
  modified_base 10: mod_base = OTHER; note = 2-fluororibose cytosine
  modified_base 11: mod_base = OTHER; note = 2-fluororibose guanine
  modified_base 12: mod_base = um
  modified_base 13: mod_base = gm
  modified_base 14: mod_base = gm
  modified_base 15: mod_base = um
  modified_base 16: mod_base = gm
  modified_base 17: mod_base = OTHER; note = 2-O-methylribose adenine
  modified_base 18: mod_base = OTHER; note = 2-O-methylribose adenine
  modified_base 19: mod_base = um
  modified_base 20: mod_base = OTHER; note = 2-O-methylribose adenine
  modified_base 20..21: mod_base = OTHER; note = phosphorothioate
  modified_base 21: mod_base = OTHER; note = 2-O-methylribose adenine
  source 1..21: mol_type = other RNA
tgtaacaatcgtggtgaataa

SEQ ID NO: 692 - RNA, 21 nt, synthetic construct
  misc_feature 1..21: note = Synthetic: WV-42411
  misc_feature 1..21: note = Synthetic: SSR-0101614
  modified_base 1: mod_base = OTHER; note = triantennary GalNAc with C12 linker linked to 6-aminohexanol linked by phosphate to the 5' end of 2-O-methylribose adenine
  modified_base 1..2: mod_base = OTHER; note = phosphorothioate
  modified_base 2: mod_base = cm
  modified_base 3: mod_base = OTHER; note = 2-O-methylribose adenine
  modified_base 4: mod_base = gm
  modified_base 5: mod_base = um
  modified_base 6: mod_base = OTHER; note = 2-O-methylribose adenine
  modified_base 7: mod_base = OTHER; note = 2-fluororibose uracil
  modified_base 8: mod_base = OTHER; note = 2-O-methylribose adenine
  modified_base 9: mod_base = OTHER; note = 2-fluororibose uracil
  modified_base 10: mod_base = OTHER; note = 2-fluororibose cytosine
  modified_base 11: mod_base = OTHER; note = 2-fluororibose cytosine
  modified_base 12: mod_base = OTHER; note = 2-O-methylribose adenine
  modified_base 13: mod_base = gm
  modified_base 14: mod_base = cm
  modified_base 15: mod_base = cm
  modified_base 16: mod_base = gm
  modified_base 17: mod_base = OTHER; note = 2-O-methylribose adenine
  modified_base 18: mod_base = um
  modified_base 19: mod_base = cm
  modified_base 20: mod_base = um
  modified_base 20..21: mod_base = OTHER; note = phosphorothioate
  modified_base 21: mod_base = OTHER; note = 2-O-methylribose adenine
  source 1..21: mol_type = other RNA
acagtatatccagccgatcta

SEQ ID NO: 693 - RNA, 21 nt, synthetic construct
  misc_feature 1..21: note = Synthetic: WV-42412
  misc_feature 1..21: note = Synthetic: SSR-0101615
  modified_base 1: mod_base = OTHER; note = triantennary GalNAc with C12 linker linked to 6-aminohexanol linked by phosphate to the 5' end of 2-O-methylribose cytosine
  modified_base 1..2: mod_base = OTHER; note = phosphorothioate
  modified_base 2: mod_base = OTHER; note = 2-O-methylribose adenine
  modified_base 3: mod_base = gm
  modified_base 4: mod_base = cm
  modified_base 5: mod_base = OTHER; note = 2-O-methylribose adenine
  modified_base 6: mod_base = cm
  modified_base 7: mod_base = OTHER; note = 2-fluororibose cytosine
  modified_base 8: mod_base = OTHER; note = 2-O-methylribose adenine
  modified_base 9: mod_base = OTHER; note = 2-fluororibose adenine
  modified_base 10: mod_base = OTHER; note = 2-fluororibose guanine
  modified_base 11: mod_base = OTHER; note = 2-fluororibose guanine
  modified_base 12: mod_base = OTHER; note = 2-O-methylribose adenine
  modified_base 13: mod_base = um
  modified_base 14: mod_base = gm
  modified_base 15: mod_base = OTHER; note = 2-O-methylribose adenine
  modified_base 16: mod_base = OTHER; note = 2-O-methylribose adenine
  modified_base 17: mod_base = gm
  modified_base 18: mod_base = OTHER; note = 2-O-methylribose adenine
  modified_base 19: mod_base = gm
  modified_base 20: mod_base = OTHER; note = 2-O-methylribose adenine
  modified_base 20..21: mod_base = OTHER; note = phosphorothioate
  modified_base 21: mod_base = OTHER; note = 2-O-methylribose adenine
  source 1..21: mol_type = other RNA
cagcaccaaggatgaagagaa

SEQ ID NO: 694 - RNA, 21 nt, synthetic construct
  misc_feature 1..21: note = Synthetic: WV-42413
  misc_feature 1..21: note = Synthetic: SSR-0101616
  modified_base 1: mod_base = OTHER; note = triantennary GalNAc with C12 linker linked to 6-aminohexanol linked by phosphate to the 5' end of 2-O-methylribose adenine
  modified_base 1..2: mod_base = OTHER; note = phosphorothioate
  modified_base 2: mod_base = gm
  modified_base 3: mod_base = cm
  modified_base 4: mod_base = OTHER; note = 2-O-methylribose adenine
  modified_base 5: mod_base = cm
  modified_base 6: mod_base = cm
  modified_base 7: mod_base = OTHER; note = 2-fluororibose adenine
  modified_base 8: mod_base = OTHER; note = 2-O-methylribose adenine
  modified_base 9: mod_base = OTHER; note = 2-fluororibose guanine
  modified_base 10: mod_base = OTHER; note = 2-fluororibose guanine
  modified_base 11: mod_base = OTHER; note = 2-fluororibose adenine
  modified_base 12: mod_base = um
  modified_base 13: mod_base = gm
  modified_base 14: mod_base = OTHER; note = 2-O-methylribose adenine
  modified_base 15: mod_base = OTHER; note = 2-O-methylribose adenine
  modified_base 16: mod_base = gm
  modified_base 17: mod_base = OTHER; note = 2-O-methylribose adenine
  modified_base 18: mod_base = gm
  modified_base 19: mod_base = OTHER; note = 2-O-methylribose adenine
  modified_base 20: mod_base = um
  modified_base 20..21: mod_base = OTHER; note = phosphorothioate
  modified_base 21: mod_base = OTHER; note = 2-O-methylribose adenine
  source 1..21: mol_type = other RNA
agcaccaaggatgaagagata

SEQ ID NO: 695 - RNA, 21 nt, synthetic construct
  misc_feature 1..21: note = Synthetic: WV-42414
  misc_feature 1..21: note = Synthetic: SSR-0101617
  modified_base 1: mod_base = OTHER; note = triantennary GalNAc with C12 linker linked to 6-aminohexanol linked by phosphate to the 5' end of 2-O-methylribose cytosine
  modified_base 1..2: mod_base = OTHER; note = phosphorothioate
  modified_base 2: mod_base = cm
  modified_base 3: mod_base = OTHER; note = 2-O-methylribose adenine
  modified_base 4: mod_base = OTHER; note = 2-O-methylribose adenine
  modified_base 5: mod_base = gm
  modified_base 6: mod_base = gm
  modified_base 7: mod_base = OTHER; note = 2-fluororibose adenine
  modified_base 8: mod_base = um
  modified_base 9: mod_base = OTHER; note = 2-fluororibose guanine
  modified_base 10: mod_base = OTHER; note = 2-fluororibose adenine
  modified_base 11: mod_base = OTHER; note = 2-fluororibose adenine
  modified_base 12: mod_base = gm
  modified_base 13: mod_base = OTHER; note = 2-O-methylribose adenine
  modified_base 14: mod_base = gm
  modified_base 15: mod_base = OTHER; note = 2-O-methylribose adenine
  modified_base 16: mod_base = um
  modified_base 17: mod_base = um
  modified_base 18: mod_base = OTHER; note = 2-O-methylribose adenine
  modified_base 19: mod_base = cm
  modified_base 20: mod_base = cm
  modified_base 20..21: mod_base = OTHER; note = phosphorothioate
  modified_base 21: mod_base = OTHER; note = 2-O-methylribose adenine
  source 1..21: mol_type = other RNA
ccaaggatgaagagattacca

SEQ ID NO: 696 - RNA, 21 nt, synthetic construct
  misc_feature 1..21: note = Synthetic: WV-42415
  misc_feature 1..21: note = Synthetic: SSR-0101618
  modified_base 1: mod_base = OTHER; note = triantennary GalNAc with C12 linker linked to 6-aminohexanol linked by phosphate to the 5' end of 2-O-methylribose guanine
  modified_base 1..2: mod_base = OTHER; note = phosphorothioate
  modified_base 2: mod_base = OTHER; note = 2-O-methylribose adenine
  modified_base 3: mod_base = cm
  modified_base 4: mod_base = OTHER; note = 2-O-methylribose adenine
  modified_base 5: mod_base = um
  modified_base 6: mod_base = um
  modified_base 7: mod_base = OTHER; note = 2-fluororibose uracil
  modified_base 8: mod_base = gm
  modified_base 9: mod_base = OTHER; note = 2-fluororibose adenine
  modified_base 10: mod_base = OTHER; note = 2-fluororibose guanine
  modified_base 11: mod_base = OTHER; note = 2-fluororibose guanine
  modified_base 12: mod_base = um
  modified_base 13: mod_base = cm
  modified_base 14: mod_base = OTHER; note = 2-O-methylribose adenine
  modified_base 15: mod_base = OTHER; note = 2-O-methylribose adenine
  modified_base 16: mod_base = cm
  modified_base 17: mod_base = OTHER; note = 2-O-methylribose adenine
  modified_base 18: mod_base = um
  modified_base 19: mod_base = cm
  modified_base 20: mod_base = cm
  modified_base 20..21: mod_base = OTHER; note = phosphorothioate
  modified_base 21: mod_base = OTHER; note = 2-O-methylribose adenine
  source 1..21: mol_type = other RNA
gacatttgaggtcaacatcca

SEQ ID NO: 697 - RNA, 21 nt, synthetic construct
  misc_feature 1..21: note = Synthetic: WV-42416
  misc_feature 1..21: note = Synthetic: SSR-0101619
  modified_base 1: mod_base = OTHER; note = triantennary GalNAc with C12 linker linked to 6-aminohexanol linked by phosphate to the 5' end of 2-O-methylribose uracil
  modified_base 1..2: mod_base = OTHER; note = phosphorothioate
  modified_base 2: mod_base = cm
  modified_base 3: mod_base = cm
  modified_base 4: mod_base = um
  modified_base 5: mod_base = OTHER; note = 2-O-methylribose adenine
  modified_base 6: mod_base = gm
  modified_base 7: mod_base = OTHER; note = 2-fluororibose guanine
  modified_base 8: mod_base = OTHER; note = 2-O-methylribose adenine
  modified_base 9: mod_base = OTHER; note = 2-fluororibose cytosine
  modified_base 10: mod_base = OTHER; note = 2-fluororibose adenine
  modified_base 11: mod_base = OTHER; note = 2-fluororibose uracil
  modified_base 12: mod_base = um
  modified_base 13: mod_base = um
  modified_base 14: mod_base = um
  modified_base 15: mod_base = um
  modified_base 16: mod_base = gm
  modified_base 17: mod_base = gm
  modified_base 18: mod_base = OTHER; note = 2-O-methylribose adenine
  modified_base 19: mod_base = um
  modified_base 20: mod_base = cm
  modified_base 20..21: mod_base = OTHER; note = phosphorothioate
  modified_base 21: mod_base = OTHER; note = 2-O-methylribose adenine
  source 1..21: mol_type = other RNA
tcctaggacatttttggatca

SEQ ID NO: 698 - RNA, 21 nt, synthetic construct
  misc_feature 1..21: note = Synthetic: WV-42417
  misc_feature 1..21: note = Synthetic: SSR-0101620
  modified_base 1: mod_base = OTHER; note = triantennary GalNAc with C12 linker linked to 6-aminohexanol linked by phosphate to the 5' end of 2-O-methylribose cytosine
  modified_base 1..2: mod_base = OTHER; note = phosphorothioate
  modified_base 2: mod_base = um
  modified_base 3: mod_base = OTHER; note = 2-O-methylribose adenine
  modified_base 4: mod_base = gm
  modified_base 5: mod_base = gm
  modified_base 6: mod_base = OTHER; note = 2-O-methylribose adenine
  modified_base 7: mod_base = OTHER; note = 2-fluororibose cytosine
  modified_base 8: mod_base = OTHER; note = 2-O-methylribose adenine
  modified_base 9: mod_base = OTHER; note = 2-fluororibose uracil
  modified_base 10: mod_base = OTHER; note = 2-fluororibose uracil
  modified_base 11: mod_base = OTHER; note = 2-fluororibose uracil
  modified_base 12: mod_base = um
  modified_base 13: mod_base = um
  modified_base 14: mod_base = gm
  modified_base 15: mod_base = gm
  modified_base 16: mod_base = OTHER; note = 2-O-methylribose adenine
  modified_base 17: mod_base = um
  modified_base 18: mod_base = cm
  modified_base 19: mod_base = OTHER; note = 2-O-methylribose adenine
  modified_base 20: mod_base = cm
  modified_base 20..21: mod_base = OTHER; note = phosphorothioate
  modified_base 21: mod_base = OTHER; note = 2-O-methylribose adenine
  source 1..21: mol_type = other RNA
ctaggacatttttggatcaca

SEQ ID NO: 699 - RNA, 21 nt, synthetic construct
  misc_feature 1..21: note = Synthetic: WV-42418
  misc_feature 1..21: note = Synthetic: SSR-0101621
  modified_base 1: mod_base = OTHER; note = triantennary GalNAc with C12 linker linked to 6-aminohexanol linked by phosphate to the 5' end of 2-O-methylribose uracil
  modified_base 1..2: mod_base = OTHER; note = phosphorothioate
  modified_base 2: mod_base = um
  modified_base 3: mod_base = gm
  modified_base 4: mod_base = gm
  modified_base 5: mod_base = OTHER; note = 2-O-methylribose adenine
  modified_base 6: mod_base = um
  modified_base 7: mod_base = OTHER; note = 2-fluororibose cytosine
  modified_base 8: mod_base = OTHER; note = 2-O-methylribose adenine
  modified_base 9: mod_base = OTHER; note = 2-fluororibose cytosine
  modified_base 10: mod_base = OTHER; note = 2-fluororibose adenine
  modified_base 11: mod_base = OTHER; note = 2-fluororibose adenine
  modified_base 12: mod_base = OTHER; note = 2-O-methylribose adenine
  modified_base 13: mod_base = OTHER; note = 2-O-methylribose adenine
  modified_base 14: mod_base = gm
  modified_base 15: mod_base = cm
  modified_base 16: mod_base = OTHER; note = 2-O-methylribose adenine
  modified_base 17: mod_base = cm
  modified_base 18: mod_base = um
  modified_base 19: mod_base = um
  modified_base 20: mod_base = cm
  modified_base 20..21: mod_base = OTHER; note = phosphorothioate
  modified_base 21: mod_base = OTHER; note = 2-O-methylribose adenine
  source 1..21: mol_type = other RNA
ttggatcacaaaagcacttca

SEQ ID NO: 700 - RNA, 21 nt, synthetic construct
  misc_feature 1..21: note = Synthetic: WV-42419
  misc_feature 1..21: note = Synthetic: SSR-0101622
  modified_base 1: mod_base = OTHER; note = triantennary GalNAc with C12 linker linked to 6-aminohexanol linked by phosphate to the 5' end of 2-O-methylribose uracil
  modified_base 1..2: mod_base = OTHER; note = phosphorothioate
  modified_base 2: mod_base = cm
  modified_base 3: mod_base = OTHER; note = 2-O-methylribose adenine
  modified_base 4: mod_base = cm
  modified_base 5: mod_base = OTHER; note = 2-O-methylribose adenine
  modified_base 6: mod_base = OTHER; note = 2-O-methylribose adenine
  modified_base 7: mod_base = OTHER; note = 2-fluororibose adenine
  modified_base 8: mod_base = OTHER; note = 2-O-methylribose adenine
  modified_base 9: mod_base = OTHER; note = 2-fluororibose guanine
  modified_base 10: mod_base = OTHER; note = 2-fluororibose cytosine
  modified_base 11: mod_base = OTHER; note = 2-fluororibose adenine
  modified_base 12: mod_base = cm
  modified_base 13: mod_base = um
  modified_base 14: mod_base = um
  modified_base 15: mod_base = cm
  modified_base 16: mod_base = um
  modified_base 17: mod_base = um
  modified_base 18: mod_base = cm
  modified_base 19: mod_base = cm
  modified_base 20: mod_base = OTHER; note = 2-O-methylribose adenine
  modified_base 20..21: mod_base = OTHER; note = phosphorothioate
  modified_base 21: mod_base = OTHER; note = 2-O-methylribose adenine
  source 1..21: mol_type = other RNA
tcacaaaagcacttcttccaa

SEQ ID NO: 701 - RNA, 21 nt, synthetic construct
  misc_feature 1..21: note = Synthetic: WV-42420
  misc_feature 1..21: note = Synthetic: SSR-0101623
  modified_base 1: mod_base = OTHER; note = triantennary GalNAc with C12 linker linked to 6-aminohexanol linked by phosphate to the 5' end of 2-O-methylribose adenine
  modified_base 1..2: mod_base = OTHER; note = phosphorothioate
  modified_base 2: mod_base = um
  modified_base 3: mod_base = cm
  modified_base 4: mod_base = cm
  modified_base 5: mod_base = cm
  modified_base 6: mod_base = OTHER; note = 2-O-methylribose adenine
  modified_base 7: mod_base = OTHER; note = 2-fluororibose uracil
  modified_base 8: mod_base = OTHER; note = 2-O-methylribose adenine
  modified_base 9: mod_base = OTHER; note = 2-fluororibose uracil
  modified_base 10: mod_base = OTHER; note = 2-fluororibose uracil
  modified_base 11: mod_base = OTHER; note = 2-fluororibose guanine
  modified_base 12: mod_base = um
  modified_base 13: mod_base = um
  modified_base 14: mod_base = cm
  modified_base 15: mod_base = cm
  modified_base 16: mod_base = OTHER; note = 2-O-methylribose adenine
  modified_base 17: mod_base = gm
  modified_base 18: mod_base = cm
  modified_base 19: mod_base = OTHER; note = 2-O-methylribose adenine
  modified_base 20: mod_base = OTHER; note = 2-O-methylribose adenine
  modified_base 20..21: mod_base = OTHER; note = phosphorothioate
  modified_base 21: mod_base = OTHER; note = 2-O-methylribose adenine
  source 1..21: mol_type = other RNA
atcccatattgttccagcaaa

SEQ ID NO: 702 - RNA, 21 nt, synthetic construct
  misc_feature 1..21: note = Synthetic: WV-42421
  misc_feature 1..21: note = Synthetic: SSR-0101624
  modified_base 1: mod_base = OTHER; note = triantennary GalNAc with C12 linker linked to 6-aminohexanol linked by phosphate to the 5' end of 2-O-methylribose guanine
  modified_base 1..2: mod_base = OTHER; note = phosphorothioate
  modified_base 2: mod_base = cm
  modified_base 3: mod_base = cm
  modified_base 4: mod_base = gm
  modified_base 5: mod_base = cm
  modified_base 6: mod_base = um
  modified_base 7: mod_base = OTHER; note = 2-fluororibose guanine
  modified_base 8: mod_base = um
  modified_base 9: mod_base = OTHER; note = 2-fluororibose uracil
  modified_base 10: mod_base = OTHER; note = 2-fluororibose guanine
  modified_base 11: mod_base = OTHER; note = 2-fluororibose guanine
  modified_base 12: mod_base = cm
  modified_base 13: mod_base = um
  modified_base 14: mod_base = um
  modified_base 15: mod_base = um
  modified_base 16: mod_base = cm
  modified_base 17: mod_base = OTHER; note = 2-O-methylribose adenine
  modified_base 18: mod_base = cm
  modified_base 19: mod_base = OTHER; note = 2-O-methylribose adenine
  modified_base 20: mod_base = gm
  modified_base 20..21: mod_base = OTHER; note = phosphorothioate
  modified_base 21: mod_base = OTHER; note = 2-O-methylribose adenine
  source 1..21: mol_type = other RNA
gccgctgttggctttcacaga

SEQ ID NO: 703 - RNA, 21 nt, synthetic construct
  misc_feature 1..21: note = Synthetic: WV-42422
  misc_feature 1..21: note = Synthetic: SSR-0101625
  modified_base 1: mod_base = OTHER; note = triantennary GalNAc with C12 linker linked to 6-aminohexanol linked by phosphate to the 5' end of 2-O-methylribose uracil
  modified_base 1..2: mod_base = OTHER; note = phosphorothioate
  modified_base 2: mod_base = um
  modified_base 3: mod_base = gm
  modified_base 4: mod_base = gm
  modified_base 5: mod_base = cm
  modified_base 6: mod_base = um
  modified_base 7: mod_base = OTHER; note = 2-fluororibose uracil
  modified_base 8: mod_base = um
  modified_base 9: mod_base = OTHER; note = 2-fluororibose cytosine
  modified_base 10: mod_base = OTHER; note = 2-fluororibose adenine
  modified_base 11: mod_base = OTHER; note = 2-fluororibose cytosine
  modified_base 12: mod_base = OTHER; note = 2-O-methylribose adenine
  modified_base 13: mod_base = gm
  modified_base 14: mod_base = OTHER; note = 2-O-methylribose adenine
  modified_base 15: mod_base = gm
  modified_base 16: mod_base = gm
  modified_base 17: mod_base = um
  modified_base 18: mod_base = cm
  modified_base 19: mod_base = um
  modified_base 20: mod_base = gm
  modified_base 20..21: mod_base = OTHER; note = phosphorothioate
  modified_base 21: mod_base = OTHER; note = 2-O-methylribose adenine
  source 1..21: mol_type = other RNA
ttggctttcacagaggtctga

SEQ ID NO: 704 - RNA, 21 nt, synthetic construct
  misc_feature 1..21: note = Synthetic: WV-42423
  misc_feature 1..21: note = Synthetic: SSR-0101626
  modified_base 1: mod_base = OTHER; note = triantennary GalNAc with C12 linker linked to 6-aminohexanol linked by phosphate to the 5' end of 2-O-methylribose guanine
  modified_base 1..2: mod_base = OTHER; note = phosphorothioate
  modified_base 2: mod_base = gm
  modified_base 3: mod_base = cm
  modified_base 4: mod_base = um
  modified_base 5: mod_base = um
  modified_base 6: mod_base = um
  modified_base 7: mod_base = OTHER; note = 2-fluororibose cytosine
  modified_base 8: mod_base = OTHER; note = 2-O-methylribose adenine
  modified_base 9: mod_base = OTHER; note = 2-fluororibose cytosine
  modified_base 10: mod_base = OTHER; note = 2-fluororibose adenine
  modified_base 11: mod_base = OTHER; note = 2-fluororibose guanine
  modified_base 12: mod_base = OTHER; note = 2-O-methylribose adenine
  modified_base 13: mod_base = gm
  modified_base 14: mod_base = gm
  modified_base 15: mod_base = um
  modified_base 16: mod_base = cm
  modified_base 17: mod_base = um
  modified_base 18: mod_base = gm
  modified_base 19: mod_base = OTHER; note = 2-O-methylribose adenine
  modified_base 20: mod_base = cm
  modified_base 20..21: mod_base = OTHER; note = phosphorothioate
  modified_base 21: mod_base = OTHER; note = 2-O-methylribose adenine
  source 1..21: mol_type = other RNA
ggctttcacagaggtctgaca

SEQ ID NO: 705 - RNA, 21 nt, synthetic construct
  misc_feature 1..21: note = Synthetic: WV-42424
  misc_feature 1..21: note = Synthetic: SSR-0101627
  modified_base 1: mod_base = OTHER; note = triantennary GalNAc with C12 linker linked to 6-aminohexanol linked by phosphate to the 5' end of 2-O-methylribose adenine
  modified_base 1..2: mod_base = OTHER; note = phosphorothioate
  modified_base 2: mod_base = gm
  modified_base 3: mod_base = gm
  modified_base 4: mod_base = um
  modified_base 5: mod_base = cm
  modified_base 6: mod_base = um
  modified_base 7: mod_base = OTHER; note = 2-fluororibose guanine
  modified_base 8: mod_base = OTHER; note = 2-O-methylribose adenine
  modified_base 9: mod_base = OTHER; note = 2-fluororibose cytosine
  modified_base 10: mod_base = OTHER; note = 2-fluororibose adenine
  modified_base 11: mod_base = OTHER; note = 2-fluororibose uracil
  modified_base 12: mod_base = cm
  modified_base 13: mod_base = OTHER; note = 2-O-methylribose adenine
  modified_base 14: mod_base = gm
  modified_base 15: mod_base = OTHER; note = 2-O-methylribose adenine
  modified_base 16: mod_base = OTHER; note = 2-O-methylribose adenine
  modified_base 17: mod_base = cm
  modified_base 18: mod_base = um
  modified_base 19: mod_base = um
  modified_base 20: mod_base = cm
  modified_base 20..21: mod_base = OTHER; note = phosphorothioate
  modified_base 21: mod_base = OTHER; note = 2-O-methylribose adenine
  source 1..21: mol_type = other RNA
aggtctgacatcagaacttca

SEQ ID NO: 706 - RNA, 21 nt, synthetic construct
  misc_feature 1..21: note = Synthetic: WV-42425
  misc_feature 1..21: note = Synthetic: SSR-0101628
  modified_base 1: mod_base = OTHER; note = triantennary GalNAc with C12 linker linked to 6-aminohexanol linked by phosphate to the 5' end of 2-O-methylribose uracil
  modified_base 1..2: mod_base = OTHER; note = phosphorothioate
  modified_base 2: mod_base = um
  modified_base 3: mod_base = gm
  modified_base 4: mod_base = gm
  modified_base 5: mod_base = gm
  modified_base 6: mod_base = OTHER; note = 2-O-methylribose adenine
  modified_base 7: mod_base = OTHER; note = 2-fluororibose adenine
  modified_base 8: mod_base = OTHER; note = 2-O-methylribose adenine
  modified_base 9: mod_base = OTHER; note = 2-fluororibose adenine
  modified_base 10: mod_base = OTHER; note = 2-fluororibose adenine
  modified_base 11: mod_base = OTHER; note = 2-fluororibose cytosine
  modified_base 12: mod_base = um
  modified_base 13: mod_base = gm
  modified_base 14: mod_base = gm
  modified_base 15: mod_base = um
  modified_base 16: mod_base = OTHER; note = 2-O-methylribose adenine
  modified_base 17: mod_base = um
  modified_base 18: mod_base = cm
  modified_base 19: mod_base = OTHER; note = 2-O-methylribose adenine
  modified_base 20: mod_base = OTHER; note = 2-O-methylribose adenine
  modified_base 20..21: mod_base = OTHER; note = phosphorothioate
  modified_base 21: mod_base = OTHER; note = 2-O-methylribose adenine
  source 1..21: mol_type = other RNA
ttgggaaaaactggtatcaaa

SEQ ID NO: 707 - RNA, 21 nt, synthetic construct
  misc_feature 1..21: note = Synthetic: WV-42426
  misc_feature 1..21: note = Synthetic: SSR-0101629
  modified_base 1: mod_base = OTHER; note = triantennary GalNAc with C12 linker linked to 6-aminohexanol linked by phosphate to the 5' end of 2-O-methylribose uracil
  modified_base 1..2: mod_base = OTHER; note = phosphorothioate
  modified_base 2: mod_base = gm
  modified_base 3: mod_base = gm
  modified_base 4: mod_base = gm
  modified_base 5: mod_base = OTHER; note = 2-O-methylribose adenine
  modified_base 6: mod_base = OTHER; note = 2-O-methylribose adenine
  modified_base 7: mod_base = OTHER; note = 2-fluororibose adenine
  modified_base 8: mod_base = OTHER; note = 2-O-methylribose adenine
  modified_base 9: mod_base = OTHER; note = 2-fluororibose adenine
  modified_base 10: mod_base = OTHER; note = 2-fluororibose cytosine
  modified_base 11: mod_base = OTHER; note = 2-fluororibose uracil
  modified_base 12: mod_base = gm
  modified_base 13: mod_base = gm
  modified_base 14: mod_base = um
  modified_base 15: mod_base = OTHER; note = 2-O-methylribose adenine
  modified_base 16: mod_base = um
  modified_base 17: mod_base = cm
  modified_base 18: mod_base = OTHER; note = 2-O-methylribose adenine
  modified_base 19: mod_base = OTHER; note = 2-O-methylribose adenine
  modified_base 20: mod_base = OTHER; note = 2-O-methylribose adenine
  modified_base 20..21: mod_base = OTHER; note = phosphorothioate
  modified_base 21: mod_base = OTHER; note = 2-O-methylribose adenine
  source 1..21: mol_type = other RNA
tgggaaaaactggtatcaaaa

SEQ ID NO: 708 - RNA, 21 nt, synthetic construct
  misc_feature 1..21: note = Synthetic: WV-42427
  misc_feature 1..21: note = Synthetic: SSR-0101630
  modified_base 1: mod_base = OTHER; note = triantennary GalNAc with C12 linker linked to 6-aminohexanol linked by phosphate to the 5' end of 2-O-methylribose uracil
  modified_base 1..2: mod_base = OTHER; note = phosphorothioate
  modified_base 2: mod_base = gm
  modified_base 3: mod_base = gm
  modified_base 4: mod_base = um
  modified_base 5: mod_base = OTHER; note = 2-O-methylribose adenine
  modified_base 6: mod_base = um
  modified_base 7: mod_base = OTHER; note = 2-fluororibose cytosine
  modified_base 8: mod_base = OTHER; note = 2-O-methylribose adenine
  modified_base 9: mod_base = OTHER; note = 2-fluororibose adenine
  modified_base 10: mod_base = OTHER; note = 2-fluororibose adenine
  modified_base 11: mod_base = OTHER; note = 2-fluororibose adenine
  modified_base 12: mod_base = cm
  modified_base 13: mod_base = cm
  modified_base 14: mod_base = um
  modified_base 15: mod_base = cm
  modified_base 16: mod_base = OTHER; note = 2-O-methylribose adenine
  modified_base 17: mod_base = um
  modified_base 18: mod_base = gm
  modified_base 19: mod_base = um
  modified_base 20: mod_base = cm
  modified_base 20..21: mod_base = OTHER; note = phosphorothioate
  modified_base 21: mod_base = OTHER; note = 2-O-methylribose adenine
  source 1..21: mol_type = other RNA
tggtatcaaaacctcatgtca

SEQ ID NO: 709 - RNA, 21 nt, synthetic construct
  misc_feature 1..21: note = Synthetic: WV-42428
  misc_feature 1..21: note = Synthetic: SSR-0101631
  modified_base 1: mod_base = OTHER; note = triantennary GalNAc with C12 linker linked to 6-aminohexanol linked by phosphate to the 5' end of 2-O-methylribose adenine
  modified_base 1..2: mod_base = OTHER; note = phosphorothioate
  modified_base 2: mod_base = gm
  modified_base 3: mod_base = cm
  modified_base 4: mod_base = OTHER; note = 2-O-methylribose adenine
  modified_base 5: mod_base = cm
  modified_base 6: mod_base = OTHER; note = 2-O-methylribose adenine
  modified_base 7: mod_base = OTHER; note = 2-fluororibose adenine
  modified_base 8: mod_base = gm
  modified_base 9: mod_base = OTHER; note = 2-fluororibose adenine
  modified_base 10: mod_base = OTHER; note = 2-fluororibose uracil
  modified_base 11: mod_base = OTHER; note = 2-fluororibose uracil
  modified_base 12: mod_base = OTHER; note = 2-O-methylribose adenine
  modified_base 13: mod_base = um
  modified_base 14: mod_base = gm
  modified_base 15: mod_base = gm
  modified_base 16: mod_base = cm
  modified_base 17: mod_base = cm
  modified_base 18: mod_base = um
  modified_base 19: mod_base = gm
  modified_base 20: mod_base = um
  modified_base 20..21: mod_base = OTHER; note = phosphorothioate
  modified_base 21: mod_base = OTHER; note = 2-O-methylribose adenine
  source 1..21: mol_type = other RNA
agcacaagattatggcctgta

SEQ ID NO: 710 - RNA, 21 nt, synthetic construct
  misc_feature 1..21: note = Synthetic: WV-42429
  misc_feature 1..21: note = Synthetic: SSR-0101632
  modified_base 1: mod_base = OTHER; note = triantennary GalNAc with C12 linker linked to 6-aminohexanol linked by phosphate to the 5' end of 2-O-methylribose guanine
  modified_base 1..2: mod_base = OTHER; note = phosphorothioate
  modified_base 2: mod_base = cm
  modified_base 3: mod_base = OTHER; note = 2-O-methylribose adenine
  modified_base 4: mod_base = cm
  modified_base 5: mod_base = OTHER; note = 2-O-methylribose adenine
  modified_base 6: mod_base = OTHER; note = 2-O-methylribose adenine
  modified_base 7: mod_base = OTHER; note = 2-fluororibose guanine
  modified_base 8: mod_base = OTHER; note = 2-O-methylribose adenine
  modified_base 9: mod_base = OTHER; note = 2-fluororibose uracil
  modified_base 10: mod_base = OTHER; note = 2-fluororibose uracil
  modified_base 11: mod_base = OTHER; note = 2-fluororibose adenine
  modified_base 12: mod_base = um
  modified_base 13: mod_base = gm
  modified_base 14: mod_base = gm
  modified_base 15: mod_base = cm
  modified_base 16: mod_base = cm
  modified_base 17: mod_base = um
  modified_base 18: mod_base = gm
  modified_base 19: mod_base = um
  modified_base 20: mod_base = OTHER; note = 2-O-methylribose adenine
  modified_base 20..21: mod_base = OTHER; note = phosphorothioate
  modified_base 21: mod_base = OTHER; note = 2-O-methylribose adenine
  source 1..21: mol_type = other RNA
gcacaagattatggcctgtaa

SEQ ID NO: 711 - RNA, 21 nt, synthetic construct
  misc_feature 1..21: note = Synthetic: WV-42430
  misc_feature 1..21: note = Synthetic: SSR-0101633
  modified_base 1: mod_base = OTHER; note = triantennary GalNAc with C12 linker linked to 6-aminohexanol linked by phosphate to the 5' end of 2-O-methylribose adenine
  modified_base 1..2: mod_base = OTHER; note = phosphorothioate
  modified_base 2: mod_base = OTHER; note = 2-O-methylribose adenine
  modified_base 3: mod_base = gm
  modified_base 4: mod_base = OTHER; note = 2-O-methylribose adenine
  modified_base 5: mod_base = um
  modified_base 6: mod_base = um
  modified_base 7: mod_base = OTHER; note = 2-fluororibose adenine
  modified_base 8: mod_base = um
  modified_base 9: mod_base = OTHER; note = 2-fluororibose guanine
  modified_base 10: mod_base = OTHER; note = 2-fluororibose guanine
  modified_base 11: mod_base = OTHER; note = 2-fluororibose cytosine
  modified_base 12: mod_base = cm
  modified_base 13: mod_base = um
  modified_base 14: mod_base = gm
  modified_base 15: mod_base = um
  modified_base 16: mod_base = OTHER; note = 2-O-methylribose adenine
  modified_base 17: mod_base = um
  modified_base 18: mod_base = um
  modified_base 19: mod_base = gm
  modified_base 20: mod_base = gm
  modified_base 20..21: mod_base = OTHER; note = phosphorothioate
  modified_base 21: mod_base = OTHER; note = 2-O-methylribose adenine
  source 1..21: mol_type = other RNA
aagattatggcctgtattgga

SEQ ID NO: 712 - RNA, 21 nt, synthetic construct
  misc_feature 1..21: note = Synthetic: WV-42431
  misc_feature 1..21: note = Synthetic: SSR-0101634
  modified_base 1: mod_base = OTHER; note = triantennary GalNAc with C12 linker linked to 6-aminohexanol linked by phosphate to the 5' end of 2-O-methylribose adenine
  modified_base 1..2: mod_base = OTHER; note = phosphorothioate
  modified_base 2: mod_base = cm
  modified_base 3: mod_base = OTHER; note = 2-O-methylribose adenine
  modified_base 4: mod_base = gm
  modified_base 5: mod_base = OTHER; note = 2-O-methylribose adenine
  modified_base 6: mod_base = um
  modified_base 7: mod_base = OTHER; note = 2-fluororibose guanine
  modified_base 8: mod_base = OTHER; note = 2-O-methylribose adenine
  modified_base 9: mod_base = OTHER; note = 2-fluororibose adenine
  modified_base 10: mod_base = OTHER; note = 2-fluororibose guanine
  modified_base 11: mod_base = OTHER; note = 2-fluororibose uracil
  modified_base 12: mod_base = cm
  modified_base 13: mod_base = gm
  modified_base 14: mod_base = um
  modified_base 15: mod_base = OTHER; note = 2-O-methylribose adenine
  modified_base 16: mod_base = OTHER; note = 2-O-methylribose adenine
  modified_base 17: mod_base = gm
  modified_base 18: mod_base = OTHER; note = 2-O-methylribose adenine
  modified_base 19: mod_base = OTHER; note = 2-O-methylribose adenine
  modified_base 20: mod_base = gm
  modified_base 20..21: mod_base = OTHER; note = phosphorothioate
  modified_base 21: mod_base = OTHER; note = 2-O-methylribose adenine
  source 1..21: mol_type = other RNA
acagatgaagtcgtaagaaga

SEQ ID NO: 713 - RNA, 21 nt, synthetic construct
  misc_feature 1..21: note = Synthetic: WV-42432
  misc_feature 1..21: note = Synthetic: SSR-0101635
  modified_base 1: mod_base = OTHER; note = triantennary GalNAc with C12 linker linked to 6-aminohexanol linked by phosphate to the 5' end of 2-O-methylribose uracil
  modified_base 1..2: mod_base = OTHER; note = phosphorothioate
  modified_base 2: mod_base = OTHER; note = 2-O-methylribose adenine
  modified_base 3: mod_base = OTHER; note = 2-O-methylribose adenine
  modified_base 4: mod_base = gm
  modified_base 5: mod_base = OTHER; note = 2-O-methylribose adenine
  modified_base 6: mod_base = OTHER; note = 2-O-methylribose adenine
  modified_base 7: mod_base = OTHER; note = 2-fluororibose guanine
  modified_base 8: mod_base = um
  modified_base 9: mod_base = OTHER; note = 2-fluororibose cytosine
  modified_base 10: mod_base = OTHER; note = 2-fluororibose uracil
  modified_base 11: mod_base = OTHER; note = 2-fluororibose guanine
  modified_base 12: mod_base = OTHER; note = 2-O-methylribose adenine
  modified_base 13: mod_base = um
  modified_base 14: mod_base = OTHER; note = 2-O-methylribose adenine
  modified_base 15: mod_base = gm
  modified_base 16: mod_base = OTHER; note = 2-O-methylribose adenine
  modified_base 17: mod_base = um
  modified_base 18: mod_base = gm
  modified_base 19: mod_base = gm
  modified_base 20: mod_base = OTHER; note = 2-O-methylribose adenine
  modified_base 20..21: mod_base = OTHER; note = phosphorothioate
  modified_base 21: mod_base = OTHER; note = 2-O-methylribose adenine
  source 1..21: mol_type = other RNA
taagaagtctgatagatggaa

SEQ ID NO: 714 - RNA, 21 nt, synthetic construct
  misc_feature 1..21: note = Synthetic: WV-42433
  misc_feature 1..21: note = Synthetic: SSR-0101636
  modified_base 1: mod_base = OTHER; note = triantennary GalNAc with C12 linker linked to 6-aminohexanol linked by phosphate to the 5' end of 2-O-methylribose adenine
  modified_base 1..2: mod_base = OTHER; note = phosphorothioate
  modified_base 2: mod_base = gm
  modified_base 3: mod_base = um
  modified_base 4: mod_base = cm
  modified_base 5: mod_base = um
  modified_base 6: mod_base = gm
  modified_base 7: mod_base = OTHER; note = 2-fluororibose adenine
  modified_base 8: mod_base = um
  modified_base 9: mod_base = OTHER; note = 2-fluororibose adenine
  modified_base 10: mod_base = OTHER; note = 2-fluororibose guanine
  modified_base 11: mod_base = OTHER; note = 2-fluororibose adenine
  modified_base 12: mod_base = um
  modified_base 13: mod_base = gm
  modified_base 14: mod_base = gm
  modified_base 15: mod_base = OTHER; note = 2-O-methylribose adenine
  modified_base 16: mod_base = OTHER; note = 2-O-methylribose adenine
  modified_base 17: mod_base = um
  modified_base 18: mod_base = OTHER; note = 2-O-methylribose adenine
  modified_base 19: mod_base = cm
  modified_base 20: mod_base = um
  modified_base 20..21: mod_base = OTHER; note = phosphorothioate
  modified_base 21: mod_base = OTHER; note = 2-O-methylribose adenine
  source 1..21: mol_type = other RNA
agtctgatagatggaatacta

SEQ ID NO: 715 - RNA, 21 nt, synthetic construct
  misc_feature 1..21: note = Synthetic: WV-42434
  misc_feature 1..21: note = Synthetic: SSR-0101637
  modified_base 1: mod_base = OTHER; note = triantennary GalNAc with C12 linker linked to 6-aminohexanol linked by phosphate to the 5' end of 2-O-methylribose guanine
  modified_base 1..2: mod_base = OTHER; note = phosphorothioate
  modified_base 2: mod_base = um
  modified_base 3: mod_base = cm
  modified_base 4: mod_base = um
  modified_base 5: mod_base = gm
  modified_base 6: mod_base = OTHER; note = 2-O-methylribose adenine
  modified_base 7: mod_base = OTHER; note = 2-fluororibose uracil
  modified_base 8: mod_base = OTHER; note = 2-O-methylribose adenine
  modified_base 9: mod_base = OTHER; note = 2-fluororibose guanine
  modified_base 10: mod_base = OTHER; note = 2-fluororibose adenine
  modified_base 11: mod_base = OTHER; note = 2-fluororibose uracil
  modified_base 12: mod_base = gm
  modified_base 13: mod_base = gm
  modified_base 14: mod_base = OTHER; note = 2-O-methylribose adenine
  modified_base 15: mod_base = OTHER; note = 2-O-methylribose adenine
  modified_base 16: mod_base = um
  modified_base 17: mod_base = OTHER; note = 2-O-methylribose adenine
  modified_base 18: mod_base = cm
  modified_base 19: mod_base = um
  modified_base 20: mod_base = um
  modified_base 20..21: mod_base = OTHER; note = phosphorothioate
  modified_base 21: mod_base = OTHER; note = 2-O-methylribose adenine
  source 1..21: mol_type = other RNA
gtctgatagatggaatactta

SEQ ID NO: 716 - RNA, 21 nt, synthetic construct
  misc_feature 1..21: note = Synthetic: WV-42435
  misc_feature 1..21: note = Synthetic: SSR-0101638
  modified_base 1: mod_base = OTHER; note = triantennary GalNAc with C12 linker linked to 6-aminohexanol linked by phosphate to the 5' end of 2-O-methylribose uracil
  modified_base 1..2: mod_base = OTHER; note = phosphorothioate
  modified_base 2: mod_base = OTHER; note = 2-O-methylribose adenine
  modified_base 3: mod_base = gm
  modified_base 4: mod_base = OTHER; note = 2-O-methylribose adenine
  modified_base 5: mod_base = um
  modified_base 6: mod_base = gm
  modified_base 7: mod_base = OTHER; note = 2-fluororibose guanine
  modified_base 8: mod_base = OTHER; note = 2-O-methylribose adenine
  modified_base 9: mod_base = OTHER; note = 2-fluororibose adenine
  modified_base 10: mod_base = OTHER; note = 2-fluororibose uracil
  modified_base 11: mod_base = OTHER; note = 2-fluororibose adenine
  modified_base 12: mod_base = cm
  modified_base 13: mod_base = um
  modified_base 14: mod_base = um
  modified_base 15: mod_base = OTHER; note = 2-O-methylribose adenine
  modified_base 16: mod_base = cm
  modified_base 17: mod_base = cm
  modified_base 18: mod_base = OTHER; note = 2-O-methylribose adenine
  modified_base 19: mod_base = OTHER; note = 2-O-methylribose adenine
  modified_base 20: mod_base = um
  modified_base 20..21: mod_base = OTHER; note = phosphorothioate
  modified_base 21: mod_base = OTHER; note = 2-O-methylribose adenine
  source 1..21: mol_type = other RNA
tagatggaatacttaccaata

SEQ ID NO: 717 - RNA, 21 nt, synthetic construct
  misc_feature 1..21: note = Synthetic: WV-42436
  misc_feature 1..21: note = Synthetic: SSR-0101639
  modified_base 1: mod_base = OTHER; note = triantennary GalNAc with C12 linker linked to 6-aminohexanol linked by phosphate to the 5' end of 2-O-methylribose adenine
  modified_base 1..2: mod_base = OTHER; note = phosphorothioate
  modified_base 2: mod_base = gm
  modified_base 3: mod_base = OTHER; note = 2-O-methylribose adenine
  modified_base 4: mod_base = um
  modified_base 5: mod_base = gm
  modified_base 6: mod_base = gm
  modified_base 7: mod_base = OTHER; note = 2-fluororibose adenine
  modified_base 8: mod_base = OTHER; note = 2-O-methylribose adenine
  modified_base 9: mod_base = OTHER; note = 2-fluororibose uracil
  modified_base 10: mod_base = OTHER; note = 2-fluororibose adenine
  modified_base 11: mod_base = OTHER; note = 2-fluororibose cytosine
  modified_base 12: mod_base = um
  modified_base 13: mod_base = um
  modified_base 14: mod_base = OTHER; note = 2-O-methylribose adenine
  modified_base 15: mod_base = cm
  modified_base 16: mod_base = cm
  modified_base 17: mod_base = OTHER; note = 2-O-methylribose adenine
  modified_base 18: mod_base = OTHER; note = 2-O-methylribose adenine
  modified_base 19: mod_base = um
  modified_base 20: mod_base = OTHER; note = 2-O-methylribose adenine
  modified_base 20..21: mod_base = OTHER; note = phosphorothioate
  modified_base 21: mod_base = OTHER; note = 2-O-methylribose adenine
  source 1..21: mol_type = other RNA
agatggaatacttaccaataa

SEQ ID NO: 718 - RNA, 21 nt, synthetic construct
  misc_feature 1..21: note = Synthetic: WV-42437
  misc_feature 1..21: note = Synthetic: SSR-0101640
  modified_base 1: mod_base = OTHER; note = triantennary GalNAc with C12 linker linked to 6-aminohexanol linked by phosphate to the 5' end of 2-O-methylribose adenine
  modified_base 1..2: mod_base = OTHER; note = phosphorothioate
  modified_base 2: mod_base = um
  modified_base 3: mod_base = gm
  modified_base 4: mod_base = gm
  modified_base 5: mod_base = OTHER; note = 2-O-methylribose adenine
  modified_base 6: mod_base = OTHER; note = 2-O-methylribose adenine
  modified_base 7: mod_base = OTHER; note = 2-fluororibose uracil
  modified_base 8: mod_base = OTHER; note = 2-O-methylribose adenine
  modified_base 9: mod_base = OTHER; note = 2-fluororibose cytosine
  modified_base 10: mod_base = OTHER; note = 2-fluororibose uracil
  modified_base 11: mod_base = OTHER; note = 2-fluororibose uracil
  modified_base 12: mod_base = OTHER; note = 2-O-methylribose adenine
  modified_base 13: mod_base = cm
  modified_base 14: mod_base = cm
  modified_base 15: mod_base = OTHER; note = 2-O-methylribose adenine
  modified_base 16: mod_base = OTHER; note = 2-O-methylribose adenine
  modified_base 17: mod_base = um
  modified_base 18: mod_base = OTHER; note = 2-O-methylribose adenine
  modified_base 19: mod_base = OTHER; note = 2-O-methylribose adenine
  modified_base 20: mod_base = gm
  modified_base 20..21: mod_base = OTHER; note = phosphorothioate
  modified_base 21: mod_base = OTHER; note = 2-O-methylribose adenine
  source 1..21: mol_type = other RNA
atggaatacttaccaataaga

SEQ ID NO: 719 - RNA, 21 nt, synthetic construct
  misc_feature 1..21: note = Synthetic: WV-42438
  misc_feature 1..21: note = Synthetic: SSR-0101641
  modified_base 1: mod_base = OTHER; note = triantennary GalNAc with C12 linker linked to 6-aminohexanol linked by phosphate to the 5' end of 2-O-methylribose uracil
  modified_base 1..2: mod_base = OTHER; note = phosphorothioate
  modified_base 2: mod_base = gm
  modified_base 3: mod_base = gm
  modified_base 4: mod_base = OTHER; note = 2-O-methylribose adenine
  modified_base 5: mod_base = OTHER; note = 2-O-methylribose adenine
  modified_base 6: mod_base = um
  modified_base 7: mod_base = OTHER; note = 2-fluororibose adenine
  modified_base 8: mod_base = cm
  modified_base 9: mod_base = OTHER; note = 2-fluororibose uracil
  modified_base 10: mod_base = OTHER; note = 2-fluororibose uracil
  modified_base 11: mod_base = OTHER; note = 2-fluororibose adenine
  modified_base 12: mod_base = cm
  modified_base 13: mod_base = cm
  modified_base 14: mod_base = OTHER; note = 2-O-methylribose adenine
  modified_base 15: mod_base = OTHER; note = 2-O-methylribose adenine
  modified_base 16: mod_base = um
  modified_base 17: mod_base = OTHER; note = 2-O-methylribose adenine
  modified_base 18: mod_base = OTHER; note = 2-O-methylribose adenine
  modified_base 19: mod_base = gm
  modified_base 20: mod_base = OTHER; note = 2-O-methylribose adenine
  modified_base 20..21: mod_base = OTHER; note = phosphorothioate
  modified_base 21: mod_base = OTHER; note = 2-O-methylribose adenine
  source 1..21: mol_type = other RNA
tggaatacttaccaataagaa

SEQ ID NO: 720 - RNA, 21 nt, synthetic construct
  misc_feature 1..21: note = Synthetic: WV-42439
  misc_feature 1..21: note = Synthetic: SSR-0101642
  modified_base 1: mod_base = OTHER; note = triantennary GalNAc with C12 linker linked to 6-aminohexanol linked by phosphate to the 5' end of 2-O-methylribose adenine
  modified_base 1..2: mod_base = OTHER; note = phosphorothioate
  modified_base 2: mod_base = cm
  modified_base 3: mod_base = cm
  modified_base 4: mod_base = OTHER; note = 2-O-methylribose adenine
  modified_base 5: mod_base = OTHER; note = 2-O-methylribose adenine
  modified_base 6: mod_base = um
  modified_base 7: mod_base = OTHER; note = 2-fluororibose adenine
  modified_base 8: mod_base = OTHER; note = 2-O-methylribose adenine
  modified_base 9: mod_base = OTHER; note = 2-fluororibose guanine
  modified_base 10: mod_base = OTHER; note = 2-fluororibose adenine
  modified_base 11: mod_base = OTHER; note = 2-fluororibose adenine
  modified_base 12: mod_base = OTHER; note = 2-O-methylribose adenine
  modified_base 13: mod_base = OTHER; note = 2-O-methylribose adenine
  modified_base 14: mod_base = um
  modified_base 15: mod_base = gm
  modified_base 16: mod_base = OTHER; note = 2-O-methylribose adenine
  modified_base 17: mod_base = um
  modified_base 18: mod_base = um
  modified_base 19: mod_base = um
  modified_base 20: mod_base = um
  modified_base 20..21: mod_base = OTHER; note = phosphorothioate
  modified_base 21: mod_base = OTHER; note = 2-O-methylribose adenine
  source 1..21: mol_type = other RNA
accaataagaaaatgatttta

SEQ ID NO: 721 - RNA, 21 nt, synthetic construct
  misc_feature 1..21: note = Synthetic: WV-42440
  misc_feature 1..21: note = Synthetic: SSR-0101643
  modified_base 1: mod_base = OTHER; note = triantennary GalNAc with C12 linker linked to 6-aminohexanol linked by phosphate to the 5' end of 2-O-methylribose guanine
  modified_base 1..2: mod_base = OTHER; note = phosphorothioate
  modified_base 2: mod_base = cm
  modified_base 3: mod_base = cm
  modified_base 4: mod_base = cm
  modified_base 5: mod_base = OTHER; note = 2-O-methylribose adenine
  modified_base 6: mod_base = OTHER; note = 2-O-methylribose adenine
  modified_base 7: mod_base = OTHER; note = 2-fluororibose adenine
  modified_base 8: mod_base = OTHER; note = 2-O-methylribose adenine
  modified_base 9: mod_base = OTHER; note = 2-fluororibose cytosine
  modified_base 10: mod_base = OTHER; note = 2-fluororibose guanine
  modified_base 11: mod_base = OTHER; note = 2-fluororibose guanine
  modified_base 12: mod_base = um
  modified_base 13: mod_base = gm
  modified_base 14: mod_base = cm
  modified_base 15: mod_base = OTHER; note = 2-O-methylribose adenine
  modified_base 16: mod_base = OTHER; note = 2-O-methylribose adenine
  modified_base 17: mod_base = cm
  modified_base 18: mod_base = um
  modified_base 19: mod_base = cm
  modified_base 20: mod_base = um
  modified_base 20..21: mod_base = OTHER; note = phosphorothioate
  modified_base 21: mod_base = OTHER; note = 2-O-methylribose adenine
  source 1..21: mol_type = other RNA
gcccaaaacggtgcaactcta

SEQ ID NO: 722 - RNA, 21 nt, synthetic construct
  misc_feature 1..21: note = Synthetic: WV-42441
  misc_feature 1..21: note = Synthetic: SSR-0101644
  modified_base 1: mod_base = OTHER; note = triantennary GalNAc with C12 linker linked to 6-aminohexanol linked by phosphate to the 5' end of 2-O-methylribose guanine
  modified_base 1..2: mod_base = OTHER; note = phosphorothioate
  modified_base 2: mod_base = um
  modified_base 3: mod_base = gm
  modified_base 4: mod_base = cm
  modified_base 5: mod_base = OTHER; note = 2-O-methylribose adenine
  modified_base 6: mod_base = OTHER; note = 2-O-methylribose adenine
  modified_base 7: mod_base = OTHER; note = 2-fluororibose cytosine
  modified_base 8: mod_base = um
  modified_base 9: mod_base = OTHER; note = 2-fluororibose cytosine
  modified_base 10: mod_base = OTHER; note = 2-fluororibose uracil
  modified_base 11: mod_base = OTHER; note = 2-fluororibose adenine
  modified_base 12: mod_base = um
  modified_base 13: mod_base = um
  modified_base 14: mod_base = cm
  modified_base 15: mod_base = um
  modified_base 16: mod_base = gm
  modified_base 17: mod_base = gm
  modified_base 18: mod_base = OTHER; note = 2-O-methylribose adenine
  modified_base 19: mod_base = cm
  modified_base 20: mod_base = um
  modified_base 20..21: mod_base = OTHER; note = phosphorothioate
  modified_base 21: mod_base = OTHER; note = 2-O-methylribose adenine
  source 1..21: mol_type = other RNA
gtgcaactctattctggacta

SEQ ID NO: 723 - RNA, 21 nt, synthetic construct
  misc_feature 1..21: note = Synthetic: WV-42442
  misc_feature 1..21: note = Synthetic: SSR-0101645
  modified_base 1: mod_base = OTHER; note = 6-aminohexanol linked by phosphate to the 5' end of 2-O-methylribose adenine
  modified_base 1..2: mod_base = OTHER; note = phosphorothioate
  modified_base 2: mod_base = gm
  modified_base 3: mod_base = OTHER; note = 2-O-methylribose adenine
  modified_base 4: mod_base = gm
  modified_base 5: mod_base = cm
  modified_base 6: mod_base = OTHER; note = 2-O-methylribose adenine
  modified_base 7: mod_base = OTHER; note = 2-fluororibose adenine
  modified_base 8: mod_base = OTHER; note = 2-O-methylribose adenine
  modified_base 9: mod_base = OTHER; note = 2-fluororibose guanine
  modified_base 10: mod_base = OTHER; note = 2-fluororibose cytosine
  modified_base 11: mod_base = OTHER; note = 2-fluororibose cytosine
  modified_base 12: mod_base = OTHER; note = 2-O-methylribose adenine
  modified_base 13: mod_base = um
  modified_base 14: mod_base = gm
  modified_base 15: mod_base = OTHER; note = 2-O-methylribose adenine
  modified_base 16: mod_base = OTHER; note = 2-O-methylribose adenine
  modified_base 17: mod_base = cm
  modified_base 18: mod_base = OTHER; note = 2-O-methylribose adenine
  modified_base 19: mod_base = um
  modified_base 20: mod_base = cm
  modified_base 20..21: mod_base = OTHER; note = phosphorothioate
  modified_base 21: mod_base = OTHER; note = 2-O-methylribose adenine
  source 1..21: mol_type = other RNA
agagcaaagccatgaacatca

SEQ ID NO: 724 - RNA, 21 nt, synthetic construct
  misc_feature 1..21: note = Synthetic: WV-42443
  misc_feature 1..21: note = Synthetic: SSR-0101646
  modified_base 1: mod_base = OTHER; note = 6-aminohexanol linked by phosphate to the 5' end of 2-O-methylribose adenine
  modified_base 1..2: mod_base = OTHER; note = phosphorothioate
  modified_base 2: mod_base = OTHER; note = 2-O-methylribose adenine
  modified_base 3: mod_base = OTHER; note = 2-O-methylribose adenine
  modified_base 4: mod_base = gm
  modified_base 5: mod_base = cm
  modified_base 6: mod_base = cm
  modified_base 7: mod_base = OTHER; note = 2-fluororibose adenine
  modified_base 8: mod_base = um
  modified_base 9: mod_base = OTHER; note = 2-fluororibose guanine
  modified_base 10: mod_base = OTHER; note = 2-fluororibose adenine
  modified_base 11: mod_base = OTHER; note = 2-fluororibose adenine
  modified_base 12: mod_base = cm
  modified_base 13: mod_base = OTHER; note = 2-O-methylribose adenine
  modified_base 14: mod_base = um
  modified_base 15: mod_base = cm
  modified_base 16: mod_base = OTHER; note = 2-O-methylribose adenine
  modified_base 17: mod_base = um
  modified_base 18: mod_base = cm
  modified_base 19: mod_base = cm
  modified_base 20: mod_base = um
  modified_base 20..21: mod_base = OTHER; note = phosphorothioate
  modified_base 21: mod_base = OTHER; note = 2-O-methylribose adenine
  source 1..21: mol_type = other RNA
aaagccatgaacatcatccta

SEQ ID NO: 725 - RNA, 21 nt, synthetic construct
  misc_feature 1..21: note = Synthetic: WV-42444
  misc_feature 1..21: note = Synthetic: SSR-0101647
  modified_base 1: mod_base = OTHER; note = 6-aminohexanol linked by phosphate to the 5' end of 2-O-methylribose cytosine
  modified_base 1..2: mod_base = OTHER; note = phosphorothioate
  modified_base 2: mod_base = OTHER; note = 2-O-methylribose adenine
  modified_base 3: mod_base = um
  modified_base 4: mod_base = gm
  modified_base 5: mod_base = OTHER; note = 2-O-methylribose adenine
  modified_base 6: mod_base = OTHER; note = 2-O-methylribose adenine
  modified_base 7: mod_base = OTHER; note = 2-fluororibose cytosine
  modified_base 8: mod_base = OTHER; note = 2-O-methylribose adenine
  modified_base 9: mod_base = OTHER; note = 2-fluororibose uracil
  modified_base 10: mod_base = OTHER; note = 2-fluororibose cytosine
  modified_base 11: mod_base = OTHER; note = 2-fluororibose adenine
  modified_base 12: mod_base = um
  modified_base 13: mod_base = cm
  modified_base 14: mod_base = cm
  modified_base 15: mod_base = um
  modified_base 16: mod_base = OTHER; note = 2-O-methylribose adenine
  modified_base 17: mod_base = gm
  modified_base 18: mod_base = OTHER; note = 2-O-methylribose adenine
  modified_base 19: mod_base = OTHER; note = 2-O-methylribose adenine
  modified_base 20: mod_base = OTHER; note = 2-O-methylribose adenine
  modified_base 20..21: mod_base = OTHER; note = phosphorothioate
  modified_base 21: mod_base = OTHER; note = 2-O-methylribose adenine
  source 1..21: mol_type = other RNA
catgaacatcatcctagaaaa

SEQ ID NO: 726 - RNA, 21 nt, synthetic construct
  misc_feature 1..21: note = Synthetic: WV-42445
  misc_feature 1..21: note = Synthetic: SSR-0101648
  modified_base 1: mod_base = OTHER; note = 6-aminohexanol linked by phosphate to the 5' end of 2-O-methylribose adenine
  modified_base 1..2: mod_base = OTHER; note = phosphorothioate
  modified_base 2: mod_base = OTHER; note = 2-O-methylribose adenine
  modified_base 3: mod_base = cm
  modified_base 4: mod_base = OTHER; note = 2-O-methylribose adenine
  modified_base 5: mod_base = um
  modified_base 6: mod_base = cm
  modified_base 7: mod_base = OTHER; note = 2-fluororibose adenine
  modified_base 8: mod_base = um
  modified_base 9: mod_base = OTHER; note = 2-fluororibose cytosine
  modified_base 10: mod_base = OTHER; note = 2-fluororibose cytosine
  modified_base 11: mod_base = OTHER; note = 2-fluororibose uracil
  modified_base 12: mod_base = OTHER; note = 2-O-methylribose adenine
  modified_base 13: mod_base = gm
  modified_base 14: mod_base = OTHER; note = 2-O-methylribose adenine
  modified_base 15: mod_base = OTHER; note = 2-O-methylribose adenine
  modified_base 16: mod_base = OTHER; note = 2-O-methylribose adenine
  modified_base 17: mod_base = um
  modified_base 18: mod_base = cm
  modified_base 19: mod_base = cm
  modified_base 20: mod_base = um
  modified_base 20..21: mod_base = OTHER; note = phosphorothioate
  modified_base 21: mod_base = OTHER; note = 2-O-methylribose adenine
  source 1..21: mol_type = other RNA
aacatcatcctagaaatccta

SEQ ID NO: 727 - RNA, 21 nt, synthetic construct
  misc_feature 1..21: note = Synthetic: WV-42446
  misc_feature 1..21: note = Synthetic: SSR-0101649
  modified_base 1: mod_base = OTHER; note = 6-aminohexanol linked by phosphate to the 5' end of 2-O-methylribose adenine
  modified_base 1..2: mod_base = OTHER; note = phosphorothioate
  modified_base 2: mod_base = um
  modified_base 3: mod_base = cm
  modified_base 4: mod_base = cm
  modified_base 5: mod_base = um
  modified_base 6: mod_base = OTHER; note = 2-O-methylribose adenine
  modified_base 7: mod_base = OTHER; note = 2-fluororibose guanine
  modified_base 8: mod_base = OTHER; note = 2-O-methylribose adenine
  modified_base 9: mod_base = OTHER; note = 2-fluororibose adenine
  modified_base 10: mod_base = OTHER; note = 2-fluororibose adenine
  modified_base 11: mod_base = OTHER; note = 2-fluororibose uracil
  modified_base 12: mod_base = cm
  modified_base 13: mod_base = cm
  modified_base 14: mod_base = um
  modified_base 15: mod_base = um
  modified_base 16: mod_base = cm
  modified_base 17: mod_base = um
  modified_base 18: mod_base = gm
  modified_base 19: mod_base = cm
  modified_base 20: mod_base = um
  modified_base 20..21: mod_base = OTHER; note = phosphorothioate
  modified_base 21: mod_base = OTHER; note = 2-O-methylribose adenine
  source 1..21: mol_type = other RNA
atcctagaaatccttctgcta

SEQ ID NO: 728 - RNA, 21 nt, synthetic construct
  misc_feature 1..21: note = Synthetic: WV-42447
  misc_feature 1..21: note = Synthetic: SSR-0101650
  modified_base 1: mod_base = OTHER; note = 6-aminohexanol linked by phosphate to the 5' end of 2-O-methylribose cytosine
  modified_base 1..2: mod_base = OTHER; note = phosphorothioate
  modified_base 2: mod_base = cm
  modified_base 3: mod_base = um
  modified_base 4: mod_base = OTHER; note = 2-O-methylribose adenine
  modified_base 5: mod_base = gm
  modified_base 6: mod_base = OTHER; note = 2-O-methylribose adenine
  modified_base 7: mod_base = OTHER; note = 2-fluororibose adenine
  modified_base 8: mod_base = OTHER; note = 2-O-methylribose adenine
  modified_base 9: mod_base = OTHER; note = 2-fluororibose uracil
  modified_base 10: mod_base = OTHER; note = 2-fluororibose cytosine
  modified_base 11: mod_base = OTHER; note = 2-fluororibose cytosine
  modified_base 12: mod_base = um
  modified_base 13: mod_base = um
  modified_base 14: mod_base = cm
  modified_base 15: mod_base = um
  modified_base 16: mod_base = gm
  modified_base 17: mod_base = cm
  modified_base 18: mod_base = um
  modified_base 19: mod_base = um
  modified_base 20: mod_base = cm
  modified_base 20..21: mod_base = OTHER; note = phosphorothioate
  modified_base 21: mod_base = OTHER; note = 2-O-methylribose adenine
  source 1..21: mol_type = other RNA
cctagaaatccttctgcttca

SEQ ID NO: 729 - RNA, 21 nt, synthetic construct
  misc_feature 1..21: note = Synthetic: WV-42448
  misc_feature 1..21: note = Synthetic: SSR-0101651
  modified_base 1: mod_base = OTHER; note = 6-aminohexanol linked by phosphate to the 5' end of 2-O-methylribose cytosine
  modified_base 1..2: mod_base = OTHER; note = phosphorothioate
  modified_base 2: mod_base = um
  modified_base 3: mod_base = gm
  modified_base 4: mod_base = cm
  modified_base 5: mod_base = um
  modified_base 6: mod_base = um
  modified_base 7: mod_base = OTHER; note = 2-fluororibose cytosine
  modified_base 8: mod_base = um
  modified_base 9: mod_base = OTHER; note = 2-fluororibose guanine
  modified_base 10: mod_base = OTHER; note = 2-fluororibose adenine
  modified_base 11: mod_base = OTHER; note = 2-fluororibose uracil
  modified_base 12: mod_base = cm
  modified_base 13: mod_base = OTHER; note = 2-O-methylribose adenine
  modified_base 14: mod_base = cm
  modified_base 15: mod_base = cm
  modified_base 16: mod_base = OTHER; note = 2-O-methylribose adenine
  modified_base 17: mod_base = um
  modified_base 18: mod_base = cm
  modified_base 19: mod_base = OTHER; note = 2-O-methylribose adenine
  modified_base 20: mod_base = um
  modified_base 20..21: mod_base = OTHER; note = phosphorothioate
  modified_base 21: mod_base = OTHER; note = 2-O-methylribose adenine
  source 1..21: mol_type = other RNA
ctgcttctgatcaccatcata

SEQ ID NO: 730 - RNA, 21 nt, synthetic construct
  misc_feature 1..21: note = Synthetic: WV-42449
  misc_feature 1..21: note = Synthetic: SSR-0101652
  modified_base 1: mod_base = OTHER; note = 6-aminohexanol linked by phosphate to the 5' end of 2-O-methylribose guanine
  modified_base 1..2: mod_base = OTHER; note = phosphorothioate
  modified_base 2: mod_base = cm
  modified_base 3: mod_base = um
  modified_base 4: mod_base = um
  modified_base 5: mod_base = cm
  modified_base 6: mod_base = um
  modified_base 7: mod_base = OTHER; note = 2-fluororibose guanine
  modified_base 8: mod_base = OTHER; note = 2-O-methylribose adenine
  modified_base 9: mod_base = OTHER; note = 2-fluororibose uracil
  modified_base 10: mod_base = OTHER; note = 2-fluororibose cytosine
  modified_base 11: mod_base = OTHER; note = 2-fluororibose adenine
  modified_base 12: mod_base = cm
  modified_base 13: mod_base = cm
  modified_base 14: mod_base = OTHER; note = 2-O-methylribose adenine
  modified_base 15: mod_base = um
  modified_base 16: mod_base = cm
  modified_base 17: mod_base = OTHER; note = 2-O-methylribose adenine
  modified_base 18: mod_base = um
  modified_base 19: mod_base = cm
  modified_base 20: mod_base = um
  modified_base 20..21: mod_base = OTHER; note = phosphorothioate
  modified_base 21: mod_base = OTHER; note = 2-O-methylribose adenine
  source 1..21: mol_type = other RNA
gcttctgatcaccatcatcta

SEQ ID NO: 731 - RNA, 21 nt, synthetic construct
  misc_feature 1..21: note = Synthetic: WV-42450
  misc_feature 1..21: note = Synthetic: SSR-0101653
  modified_base 1: mod_base = OTHER; note = 6-aminohexanol linked by phosphate to the 5' end of 2-O-methylribose guanine
  modified_base 1..2: mod_base = OTHER; note = phosphorothioate
  modified_base 2: mod_base = gm
  modified_base 3: mod_base = gm
  modified_base 4: mod_base = gm
  modified_base 5: mod_base = OTHER; note = 2-O-methylribose adenine
  modified_base 6: mod_base = gm
  modified_base 7: mod_base = OTHER; note = 2-fluororibose adenine
  modified_base 8: mod_base = um
  modified_base 9: mod_base = OTHER; note = 2-fluororibose uracil
  modified_base 10: mod_base = OTHER; note = 2-fluororibose guanine
  modified_base 11: mod_base = OTHER; note = 2-fluororibose uracil
  modified_base 12: mod_base = um
  modified_base 13: mod_base = cm
  modified_base 14: mod_base = um
  modified_base 15: mod_base = cm
  modified_base 16: mod_base = OTHER; note = 2-O-methylribose adenine
  modified_base 17: mod_base = um
  modified_base 18: mod_base = um
  modified_base 19: mod_base = OTHER; note = 2-O-methylribose adenine
  modified_base 20: mod_base = cm
  modified_base 20..21: mod_base = OTHER; note = phosphorothioate
  modified_base 21: mod_base = OTHER; note = 2-O-methylribose adenine
  source 1..21: mol_type = other RNA
ggggagattgttctcattaca

SEQ ID NO: 732 - RNA, 21 nt, synthetic construct
  misc_feature 1..21: note = Synthetic: WV-42451
  misc_feature 1..21: note = Synthetic: SSR-0101654
  modified_base 1: mod_base = OTHER; note = 6-aminohexanol linked by phosphate to the 5' end of 2-O-methylribose guanine
  modified_base 1..2: mod_base = OTHER; note = phosphorothioate
  modified_base 2: mod_base = gm
  modified_base 3: mod_base = gm
  modified_base 4: mod_base = OTHER; note = 2-O-methylribose adenine
  modified_base 5: mod_base = gm
  modified_base 6: mod_base = OTHER; note = 2-O-methylribose adenine
  modified_base 7: mod_base = OTHER; note = 2-fluororibose uracil
  modified_base 8: mod_base = um
  modified_base 9: mod_base = OTHER; note = 2-fluororibose guanine
  modified_base 10: mod_base = OTHER; note = 2-fluororibose uracil
  modified_base 11: mod_base = OTHER; note = 2-fluororibose uracil
  modified_base 12: mod_base = cm
  modified_base 13: mod_base = um
  modified_base 14: mod_base = cm
  modified_base 15: mod_base = OTHER; note = 2-O-methylribose adenine
  modified_base 16: mod_base = um
  modified_base 17: mod_base = um
  modified_base 18: mod_base = OTHER; note = 2-O-methylribose adenine
  modified_base 19: mod_base = cm
  modified_base 20: mod_base = um
  modified_base 20..21: mod_base = OTHER; note = phosphorothioate
  modified_base 21: mod_base = OTHER; note = 2-O-methylribose adenine
  source 1..21: mol_type = other RNA
gggagattgttctcattacta

SEQ ID NO: 733 - RNA, 21 nt, synthetic construct
  misc_feature 1..21: note = Synthetic: WV-42452
  misc_feature 1..21: note = Synthetic: SSR-0101655
  modified_base 1: mod_base = OTHER; note = 6-aminohexanol linked by phosphate to the 5' end of 2-O-methylribose adenine
  modified_base 1..2: mod_base = OTHER; note = phosphorothioate
  modified_base 2: mod_base = OTHER; note = 2-O-methylribose adenine
  modified_base 3: mod_base = OTHER; note = 2-O-methylribose adenine
  modified_base 4: mod_base = gm
  modified_base 5: mod_base = OTHER; note = 2-O-methylribose adenine
  modified_base 6: mod_base = OTHER; note = 2-O-methylribose adenine
  modified_base 7: mod_base = OTHER; note = 2-fluororibose guanine
  modified_base 8: mod_base = um
  modified_base 9: mod_base = OTHER; note = 2-fluororibose guanine
  modified_base 10: mod_base = OTHER; note = 2-fluororibose guanine
  modified_base 11: mod_base = OTHER; note = 2-fluororibose guanine
  modified_base 12: mod_base = um
  modified_base 13: mod_base = gm
  modified_base 14: mod_base = OTHER; note = 2-O-methylribose adenine
  modified_base 15: mod_base = um
  modified_base 16: mod_base = gm
  modified_base 17: mod_base = um
  modified_base 18: mod_base = OTHER; note = 2-O-methylribose adenine
  modified_base 19: mod_base = OTHER; note = 2-O-methylribose adenine
  modified_base 20: mod_base = cm
  modified_base 20..21: mod_base = OTHER; note = phosphorothioate
  modified_base 21: mod_base = OTHER; note = 2-O-methylribose adenine
  source 1..21: mol_type = other RNA
aaagaagtgggtgatgtaaca

SEQ ID NO: 734 - RNA, 21 nt, synthetic construct
  misc_feature 1..21: note = Synthetic: WV-42453
  misc_feature 1..21: note = Synthetic: SSR-0101656
  modified_base 1: mod_base = OTHER; note = 6-aminohexanol linked by phosphate to the 5' end of 2-O-methylribose guanine
  modified_base 1..2: mod_base = OTHER; note = phosphorothioate
  modified_base 2: mod_base = um
  modified_base 3: mod_base = gm
  modified_base 4: mod_base = OTHER; note = 2-O-methylribose adenine
  modified_base 5: mod_base = um
  modified_base 6: mod_base = gm
  modified_base 7: mod_base = OTHER; note = 2-fluororibose uracil
  modified_base 8: mod_base = OTHER; note = 2-O-methylribose adenine
  modified_base 9: mod_base = OTHER; note = 2-fluororibose adenine
  modified_base 10: mod_base = OTHER; note = 2-fluororibose cytosine
  modified_base 11: mod_base = OTHER; note = 2-fluororibose adenine
  modified_base 12: mod_base = OTHER; note = 2-O-methylribose adenine
  modified_base 13: mod_base = um
  modified_base 14: mod_base = cm
  modified_base 15: mod_base = gm
  modified_base 16: mod_base = um
  modified_base 17: mod_base = gm
  modified_base 18: mod_base = gm
  modified_base 19: mod_base = um
  modified_base 20: mod_base = gm
  modified_base 20..21: mod_base = OTHER; note = phosphorothioate
  modified_base 21: mod_base = OTHER; note = 2-O-methylribose adenine
  source 1..21: mol_type = other RNA
gtgatgtaacaatcgtggtga

SEQ ID NO: 735 - RNA, 21 nt, synthetic construct
  misc_feature 1..21: note = Synthetic: WV-42454
  misc_feature 1..21: note = Synthetic: SSR-0101657
  modified_base 1: mod_base = OTHER; note = 6-aminohexanol linked by phosphate to the 5' end of 2-O-methylribose uracil
  modified_base 1..2: mod_base = OTHER; note = phosphorothioate
  modified_base 2: mod_base = gm
  modified_base 3: mod_base = um
  modified_base 4: mod_base = OTHER; note = 2-O-methylribose adenine
  modified_base 5: mod_base = OTHER; note = 2-O-methylribose adenine
  modified_base 6: mod_base = cm
  modified_base 7: mod_base = OTHER; note = 2-fluororibose adenine
  modified_base 8: mod_base = OTHER; note = 2-O-methylribose adenine
  modified_base 9: mod_base = OTHER; note = 2-fluororibose uracil
  modified_base 10: mod_base = OTHER; note = 2-fluororibose cytosine
  modified_base 11: mod_base = OTHER; note = 2-fluororibose guanine
  modified_base 12: mod_base = um
  modified_base 13: mod_base = gm
  modified_base 14: mod_base = gm
  modified_base 15: mod_base = um
  modified_base 16: mod_base = gm
  modified_base 17: mod_base = OTHER; note = 2-O-methylribose adenine
  modified_base 18: mod_base = OTHER; note = 2-O-methylribose adenine
  modified_base 19: mod_base = um
  modified_base 20: mod_base = OTHER; note = 2-O-methylribose adenine
  modified_base 20..21: mod_base = OTHER; note = phosphorothioate
  modified_base 21: mod_base = OTHER; note = 2-O-methylribose adenine
  source 1..21: mol_type = other RNA
tgtaacaatcgtggtgaataa

SEQ ID NO: 736 - RNA, 21 nt, synthetic construct
  misc_feature 1..21: note = Synthetic: WV-42455
  misc_feature 1..21: note = Synthetic: SSR-0101658
  modified_base 1: mod_base = OTHER; note = 6-aminohexanol linked by phosphate to the 5' end of 2-O-methylribose adenine
  modified_base 1..2: mod_base = OTHER; note = phosphorothioate
  modified_base 2: mod_base = cm
  modified_base 3: mod_base = OTHER; note = 2-O-methylribose adenine
  modified_base 4: mod_base = gm
  modified_base 5: mod_base = um
  modified_base 6: mod_base = OTHER; note = 2-O-methylribose adenine
  modified_base 7: mod_base = OTHER; note = 2-fluororibose uracil
  modified_base 8: mod_base = OTHER; note = 2-O-methylribose adenine
  modified_base 9: mod_base = OTHER; note = 2-fluororibose uracil
  modified_base 10: mod_base = OTHER; note = 2-fluororibose cytosine
  modified_base 11: mod_base = OTHER; note = 2-fluororibose cytosine
  modified_base 12: mod_base = OTHER; note = 2-O-methylribose adenine
  modified_base 13: mod_base = gm
  modified_base 14: mod_base = cm
  modified_base 15: mod_base = cm
  modified_base 16: mod_base = gm
  modified_base 17: mod_base = OTHER; note = 2-O-methylribose adenine
  modified_base 18: mod_base = um
  modified_base 19: mod_base = cm
  modified_base 20: mod_base = um
  modified_base 20..21: mod_base = OTHER; note = phosphorothioate
  modified_base 21: mod_base = OTHER; note = 2-O-methylribose adenine
  source 1..21: mol_type = other RNA
acagtatatccagccgatcta

SEQ ID NO: 737 - RNA, 21 nt, synthetic construct
  misc_feature 1..21: note = Synthetic: WV-42456
  misc_feature 1..21: note = Synthetic: SSR-0101659
  modified_base 1: mod_base = OTHER; note = 6-aminohexanol linked by phosphate to the 5' end of 2-O-methylribose cytosine
  modified_base 1..2: mod_base = OTHER; note = phosphorothioate
  modified_base 2: mod_base = OTHER; note = 2-O-methylribose adenine
  modified_base 3: mod_base = gm
  modified_base 4: mod_base = cm
  modified_base 5: mod_base = OTHER; note = 2-O-methylribose adenine
  modified_base 6: mod_base = cm
  modified_base 7: mod_base = OTHER; note = 2-fluororibose cytosine
  modified_base 8: mod_base = OTHER; note = 2-O-methylribose adenine
  modified_base 9: mod_base = OTHER; note = 2-fluororibose adenine
  modified_base 10: mod_base = OTHER; note = 2-fluororibose guanine
  modified_base 11: mod_base = OTHER; note = 2-fluororibose guanine
  modified_base 12: mod_base = OTHER; note = 2-O-methylribose adenine
  modified_base 13: mod_base = um
  modified_base 14: mod_base = gm
  modified_base 15: mod_base = OTHER; note = 2-O-methylribose adenine
  modified_base 16: mod_base = OTHER; note = 2-O-methylribose adenine
  modified_base 17: mod_base = gm
  modified_base 18: mod_base = OTHER; note = 2-O-methylribose adenine
  modified_base 19: mod_base = gm
  modified_base 20: mod_base = OTHER; note = 2-O-methylribose adenine
  modified_base 20..21: mod_base = OTHER; note = phosphorothioate
  modified_base 21: mod_base = OTHER; note = 2-O-methylribose adenine
  source 1..21: mol_type = other RNA
cagcaccaaggatgaagagaa

SEQ ID NO: 738 - RNA, 21 nt, synthetic construct
  misc_feature 1..21: note = Synthetic: WV-42457
  misc_feature 1..21: note = Synthetic: SSR-0101660
  modified_base 1: mod_base = OTHER; note = 6-aminohexanol linked by phosphate to the 5' end of 2-O-methylribose adenine
  modified_base 1..2: mod_base = OTHER; note = phosphorothioate
  modified_base 2: mod_base = gm
  modified_base 3: mod_base = cm
  modified_base 4: mod_base = OTHER; note = 2-O-methylribose adenine
  modified_base 5: mod_base = cm
  modified_base 6: mod_base = cm
  modified_base 7: mod_base = OTHER; note = 2-fluororibose adenine
  modified_base 8: mod_base = OTHER; note = 2-O-methylribose adenine
  modified_base 9: mod_base = OTHER; note = 2-fluororibose guanine
  modified_base 10: mod_base = OTHER; note = 2-fluororibose guanine
  modified_base 11: mod_base = OTHER; note = 2-fluororibose adenine
  modified_base 12: mod_base = um
  modified_base 13: mod_base = gm
  modified_base 14: mod_base = OTHER; note = 2-O-methylribose adenine
  modified_base 15: mod_base = OTHER; note = 2-O-methylribose adenine
  modified_base 16: mod_base = gm
  modified_base 17: mod_base = OTHER; note = 2-O-methylribose adenine
  modified_base 18: mod_base = gm
  modified_base 19: mod_base = OTHER; note = 2-O-methylribose adenine
  modified_base 20: mod_base = um
  modified_base 20..21: mod_base = OTHER; note = phosphorothioate
  modified_base 21: mod_base = OTHER; note = 2-O-methylribose adenine
  source 1..21: mol_type = other RNA
agcaccaaggatgaagagata

SEQ ID NO: 739 - RNA, 21 nt, synthetic construct
  misc_feature 1..21: note = Synthetic: WV-42458
  misc_feature 1..21: note = Synthetic: SSR-0101661
  modified_base 1: mod_base = OTHER; note = 6-aminohexanol linked by phosphate to the 5' end of 2-O-methylribose cytosine
  modified_base 1..2: mod_base = OTHER; note = phosphorothioate
  modified_base 2: mod_base = cm
  modified_base 3: mod_base = OTHER; note = 2-O-methylribose adenine
  modified_base 4: mod_base = OTHER; note = 2-O-methylribose adenine
  modified_base 5: mod_base = gm
  modified_base 6: mod_base = gm
  modified_base 7: mod_base = OTHER; note = 2-fluororibose adenine
  modified_base 8: mod_base = um
  modified_base 9: mod_base = OTHER; note = 2-fluororibose guanine
  modified_base 10: mod_base = OTHER; note = 2-fluororibose adenine
  modified_base 11: mod_base = OTHER; note = 2-fluororibose adenine
  modified_base 12: mod_base = gm
  modified_base 13: mod_base = OTHER; note = 2-O-methylribose adenine
  modified_base 14: mod_base = gm
  modified_base 15: mod_base = OTHER; note = 2-O-methylribose adenine
  modified_base 16: mod_base = um
  modified_base 17: mod_base = um
  modified_base 18: mod_base = OTHER; note = 2-O-methylribose adenine
  modified_base 19: mod_base = cm
  modified_base 20: mod_base = cm
  modified_base 20..21: mod_base = OTHER; note = phosphorothioate
  modified_base 21: mod_base = OTHER; note = 2-O-methylribose adenine
  source 1..21: mol_type = other RNA
ccaaggatgaagagattacca

SEQ ID NO: 740 - RNA, 21 nt, synthetic construct
  misc_feature 1..21: note = Synthetic: WV-42459
  misc_feature 1..21: note = Synthetic: SSR-0101662
  modified_base 1: mod_base = OTHER; note = 6-aminohexanol linked by phosphate to the 5' end of 2-O-methylribose guanine
  modified_base 1..2: mod_base = OTHER; note = phosphorothioate
  modified_base 2: mod_base = OTHER; note = 2-O-methylribose adenine
  modified_base 3: mod_base = cm
  modified_base 4: mod_base = OTHER; note = 2-O-methylribose adenine
  modified_base 5: mod_base = um
  modified_base 6: mod_base = um
  modified_base 7: mod_base = OTHER; note = 2-fluororibose uracil
  modified_base 8: mod_base = gm
  modified_base 9: mod_base = OTHER; note = 2-fluororibose adenine
  modified_base 10: mod_base = OTHER; note = 2-fluororibose guanine
  modified_base 11: mod_base = OTHER; note = 2-fluororibose guanine
  modified_base 12: mod_base = um
  modified_base 13: mod_base = cm
  modified_base 14: mod_base = OTHER; note = 2-O-methylribose adenine
  modified_base 15: mod_base = OTHER; note = 2-O-methylribose adenine
  modified_base 16: mod_base = cm
  modified_base 17: mod_base = OTHER; note = 2-O-methylribose adenine
  modified_base 18: mod_base = um
  modified_base 19: mod_base = cm
  modified_base 20: mod_base = cm
  modified_base 20..21: mod_base = OTHER; note = phosphorothioate
  modified_base 21: mod_base = OTHER; note = 2-O-methylribose adenine
  source 1..21: mol_type = other RNA
gacatttgaggtcaacatcca

SEQ ID NO: 741 - RNA, 21 nt, synthetic construct
  misc_feature 1..21: note = Synthetic: WV-42460
  misc_feature 1..21: note = Synthetic: SSR-0101663
  modified_base 1: mod_base = OTHER; note = 6-aminohexanol linked by phosphate to the 5' end of 2-O-methylribose uracil
  modified_base 1..2: mod_base = OTHER; note = phosphorothioate
  modified_base 2: mod_base = cm
  modified_base 3: mod_base = cm
  modified_base 4: mod_base = um
  modified_base 5: mod_base = OTHER; note = 2-O-methylribose adenine
  modified_base 6: mod_base = gm
  modified_base 7: mod_base = OTHER; note = 2-fluororibose guanine
  modified_base 8: mod_base = OTHER; note = 2-O-methylribose adenine
  modified_base 9: mod_base = OTHER; note = 2-fluororibose cytosine
  modified_base 10: mod_base = OTHER; note = 2-fluororibose adenine
  modified_base 11: mod_base = OTHER; note = 2-fluororibose uracil
  modified_base 12: mod_base = um
  modified_base 13: mod_base = um
  modified_base 14: mod_base = um
  modified_base 15: mod_base = um
  modified_base 16: mod_base = gm
  modified_base 17: mod_base = gm
  modified_base 18: mod_base = OTHER; note = 2-O-methylribose adenine
  modified_base 19: mod_base = um
  modified_base 20: mod_base = cm
  modified_base 20..21: mod_base = OTHER; note = phosphorothioate
  modified_base 21: mod_base = OTHER; note = 2-O-methylribose adenine
  source 1..21: mol_type = other RNA
tcctaggacatttttggatca

SEQ ID NO: 742 - RNA, 21 nt, synthetic construct
  misc_feature 1..21: note = Synthetic: WV-42461
  misc_feature 1..21: note = Synthetic: SSR-0101664
  modified_base 1: mod_base = OTHER; note = 6-aminohexanol linked by phosphate to the 5' end of 2-O-methylribose cytosine
  modified_base 1..2: mod_base = OTHER; note = phosphorothioate
  modified_base 2: mod_base = um
  modified_base 3: mod_base = OTHER; note = 2-O-methylribose adenine
  modified_base 4: mod_base = gm
  modified_base 5: mod_base = gm
  modified_base 6: mod_base = OTHER; note = 2-O-methylribose adenine
  modified_base 7: mod_base = OTHER; note = 2-fluororibose cytosine
  modified_base 8: mod_base = OTHER; note = 2-O-methylribose adenine
  modified_base 9: mod_base = OTHER; note = 2-fluororibose uracil
  modified_base 10: mod_base = OTHER; note = 2-fluororibose uracil
  modified_base 11: mod_base = OTHER; note = 2-fluororibose uracil
  modified_base 12: mod_base = um
  modified_base 13: mod_base = um
  modified_base 14: mod_base = gm
  modified_base 15: mod_base = gm
  modified_base 16: mod_base = OTHER; note = 2-O-methylribose adenine
  modified_base 17: mod_base = um
  modified_base 18: mod_base = cm
  modified_base 19: mod_base = OTHER; note = 2-O-methylribose adenine
  modified_base 20: mod_base = cm
  modified_base 20..21: mod_base = OTHER; note = phosphorothioate
  modified_base 21: mod_base = OTHER; note = 2-O-methylribose adenine
  source 1..21: mol_type = other RNA
ctaggacatttttggatcaca

SEQ ID NO: 743 - RNA, 21 nt, synthetic construct
  misc_feature 1..21: note = Synthetic: WV-42462
  misc_feature 1..21: note = Synthetic: SSR-0101665
  modified_base 1: mod_base = OTHER; note = 6-aminohexanol linked by phosphate to the 5' end of 2-O-methylribose uracil
  modified_base 1..2: mod_base = OTHER; note = phosphorothioate
  modified_base 2: mod_base = um
  modified_base 3: mod_base = gm
  modified_base 4: mod_base = gm
  modified_base 5: mod_base = OTHER; note = 2-O-methylribose adenine
  modified_base 6: mod_base = um
  modified_base 7: mod_base = OTHER; note = 2-fluororibose cytosine
  modified_base 8: mod_base = OTHER; note = 2-O-methylribose adenine
  modified_base 9: mod_base = OTHER; note = 2-fluororibose cytosine
  modified_base 10: mod_base = OTHER; note = 2-fluororibose adenine
  modified_base 11: mod_base = OTHER; note = 2-fluororibose adenine
  modified_base 12: mod_base = OTHER; note = 2-O-methylribose adenine
  modified_base 13: mod_base = OTHER; note = 2-O-methylribose adenine
  modified_base 14: mod_base = gm
  modified_base 15: mod_base = cm
  modified_base 16: mod_base = OTHER; note = 2-O-methylribose adenine
  modified_base 17: mod_base = cm
  modified_base 18: mod_base = um
  modified_base 19: mod_base = um
  modified_base 20: mod_base = cm
  modified_base 20..21: mod_base = OTHER; note = phosphorothioate
  modified_base 21: mod_base = OTHER; note = 2-O-methylribose adenine
  source 1..21: mol_type = other RNA
ttggatcacaaaagcacttca

SEQ ID NO: 744 - RNA, 21 nt, synthetic construct
  misc_feature 1..21: note = Synthetic: WV-42463
  misc_feature 1..21: note = Synthetic: SSR-0101666
  modified_base 1: mod_base = OTHER; note = 6-aminohexanol linked by phosphate to the 5' end of 2-O-methylribose uracil
  modified_base 1..2: mod_base = OTHER; note = phosphorothioate
  modified_base 2: mod_base = cm
  modified_base 3: mod_base = OTHER; note = 2-O-methylribose adenine
  modified_base 4: mod_base = cm
  modified_base 5: mod_base = OTHER; note = 2-O-methylribose adenine
  modified_base 6: mod_base = OTHER; note = 2-O-methylribose adenine
  modified_base 7: mod_base = OTHER; note = 2-fluororibose adenine
  modified_base 8: mod_base = OTHER; note = 2-O-methylribose adenine
  modified_base 9: mod_base = OTHER; note = 2-fluororibose guanine
  modified_base 10: mod_base = OTHER; note = 2-fluororibose cytosine
  modified_base 11: mod_base = OTHER; note = 2-fluororibose adenine
  modified_base 12: mod_base = cm
  modified_base 13: mod_base = um
  modified_base 14: mod_base = um
  modified_base 15: mod_base = cm
  modified_base 16: mod_base = um
  modified_base 17: mod_base = um
  modified_base 18: mod_base = cm
  modified_base 19: mod_base = cm
  modified_base 20: mod_base = OTHER; note = 2-O-methylribose adenine
  modified_base 20..21: mod_base = OTHER; note = phosphorothioate
  modified_base 21: mod_base = OTHER; note = 2-O-methylribose adenine
  source 1..21: mol_type = other RNA
tcacaaaagcacttcttccaa

SEQ ID NO: 745 - RNA, 21 nt, synthetic construct
  misc_feature 1..21: note = Synthetic: WV-42464
  misc_feature 1..21: note = Synthetic: SSR-0101667
  modified_base 1: mod_base = OTHER; note = 6-aminohexanol linked by phosphate to the 5' end of 2-O-methylribose adenine
  modified_base 1..2: mod_base = OTHER; note = phosphorothioate
  modified_base 2: mod_base = um
  modified_base 3: mod_base = cm
  modified_base 4: mod_base = cm
  modified_base 5: mod_base = cm
  modified_base 6: mod_base = OTHER; note = 2-O-methylribose adenine
  modified_base 7: mod_base = OTHER; note = 2-fluororibose uracil
  modified_base 8: mod_base = OTHER; note = 2-O-methylribose adenine
  modified_base 9: mod_base = OTHER; note = 2-fluororibose uracil
  modified_base 10: mod_base = OTHER; note = 2-fluororibose uracil
  modified_base 11: mod_base = OTHER; note = 2-fluororibose guanine
  modified_base 12: mod_base = um
  modified_base 13: mod_base = um
  modified_base 14: mod_base = cm
  modified_base 15: mod_base = cm
  modified_base 16: mod_base = OTHER; note = 2-O-methylribose adenine
  modified_base 17: mod_base = gm
  modified_base 18: mod_base = cm
  modified_base 19: mod_base = OTHER; note = 2-O-methylribose adenine
  modified_base 20: mod_base = OTHER; note = 2-O-methylribose adenine
  modified_base 20..21: mod_base = OTHER; note = phosphorothioate
  modified_base 21: mod_base = OTHER; note = 2-O-methylribose adenine
  source 1..21: mol_type = other RNA
atcccatattgttccagcaaa

SEQ ID NO: 746 - RNA, 21 nt, synthetic construct
  misc_feature 1..21: note = Synthetic: WV-42465
  misc_feature 1..21: note = Synthetic: SSR-0101668
  modified_base 1: mod_base = OTHER; note = 6-aminohexanol linked by phosphate to the 5' end of 2-O-methylribose guanine
  modified_base 1..2: mod_base = OTHER; note = phosphorothioate
  modified_base 2: mod_base = cm
  modified_base 3: mod_base = cm
  modified_base 4: mod_base = gm
  modified_base 5: mod_base = cm
  modified_base 6: mod_base = um
  modified_base 7: mod_base = OTHER; note = 2-fluororibose guanine
  modified_base 8: mod_base = um
  modified_base 9: mod_base = OTHER; note = 2-fluororibose uracil
  modified_base 10: mod_base = OTHER; note = 2-fluororibose guanine
  modified_base 11: mod_base = OTHER; note = 2-fluororibose guanine
  modified_base 12: mod_base = cm
  modified_base 13: mod_base = um
  modified_base 14: mod_base = um
  modified_base 15: mod_base = um
  modified_base 16: mod_base = cm
  modified_base 17: mod_base = OTHER; note = 2-O-methylribose adenine
  modified_base 18: mod_base = cm
  modified_base 19: mod_base = OTHER; note = 2-O-methylribose adenine
  modified_base 20: mod_base = gm
  modified_base 20..21: mod_base = OTHER; note = phosphorothioate
  modified_base 21: mod_base = OTHER; note = 2-O-methylribose adenine
  source 1..21: mol_type = other RNA
gccgctgttggctttcacaga

SEQ ID NO: 747 - RNA, 21 nt, synthetic construct
  misc_feature 1..21: note = Synthetic: WV-42466
  misc_feature 1..21: note = Synthetic: SSR-0101669
  modified_base 1: mod_base = OTHER; note = 6-aminohexanol linked by phosphate to the 5' end of 2-O-methylribose uracil
  modified_base 1..2: mod_base = OTHER; note = phosphorothioate
  modified_base 2: mod_base = um
  modified_base 3: mod_base = gm
  modified_base 4: mod_base = gm
  modified_base 5: mod_base = cm
  modified_base 6: mod_base = um
  modified_base 7: mod_base = OTHER; note = 2-fluororibose uracil
  modified_base 8: mod_base = um
  modified_base 9: mod_base = OTHER; note = 2-fluororibose cytosine
  modified_base 10: mod_base = OTHER; note = 2-fluororibose adenine
  modified_base 11: mod_base = OTHER; note = 2-fluororibose cytosine
  modified_base 12: mod_base = OTHER; note = 2-O-methylribose adenine
  modified_base 13: mod_base = gm
  modified_base 14: mod_base = OTHER; note = 2-O-methylribose adenine
  modified_base 15: mod_base = gm
  modified_base 16: mod_base = gm
  modified_base 17: mod_base = um
  modified_base 18: mod_base = cm
  modified_base 19: mod_base = um
  modified_base 20: mod_base = gm
  modified_base 20..21: mod_base = OTHER; note = phosphorothioate
  modified_base 21: mod_base = OTHER; note = 2-O-methylribose adenine
  source 1..21: mol_type = other RNA
ttggctttcacagaggtctga

SEQ ID NO: 748 - RNA, 21 nt, synthetic construct
  misc_feature 1..21: note = Synthetic: WV-42467
  misc_feature 1..21: note = Synthetic: SSR-0101670
  modified_base 1: mod_base = OTHER; note = 6-aminohexanol linked by phosphate to the 5' end of 2-O-methylribose guanine
  modified_base 1..2: mod_base = OTHER; note = phosphorothioate
  modified_base 2: mod_base = gm
  modified_base 3: mod_base = cm
  modified_base 4: mod_base = um
  modified_base 5: mod_base = um
  modified_base 6: mod_base = um
  modified_base 7: mod_base = OTHER; note = 2-fluororibose cytosine
  modified_base 8: mod_base = OTHER; note = 2-O-methylribose adenine
  modified_base 9: mod_base = OTHER; note = 2-fluororibose cytosine
  modified_base 10: mod_base = OTHER; note = 2-fluororibose adenine
  modified_base 11: mod_base = OTHER; note = 2-fluororibose guanine
  modified_base 12: mod_base = OTHER; note = 2-O-methylribose adenine
  modified_base 13: mod_base = gm
  modified_base 14: mod_base = gm
  modified_base 15: mod_base = um
  modified_base 16: mod_base = cm
  modified_base 17: mod_base = um
  modified_base 18: mod_base = gm
  modified_base 19: mod_base = OTHER; note = 2-O-methylribose adenine
  modified_base 20: mod_base = cm
  modified_base 20..21: mod_base = OTHER; note = phosphorothioate
  modified_base 21: mod_base = OTHER; note = 2-O-methylribose adenine
  source 1..21: mol_type = other RNA
ggctttcacagaggtctgaca

SEQ ID NO: 749 - RNA, 21 nt, synthetic construct
  misc_feature 1..21: note = Synthetic: WV-42468
  misc_feature 1..21: note = Synthetic: SSR-0101671
  modified_base 1: mod_base = OTHER; note = 6-aminohexanol linked by phosphate to the 5' end of 2-O-methylribose adenine
  modified_base 1..2: mod_base = OTHER; note = phosphorothioate
  modified_base 2: mod_base = gm
  modified_base 3: mod_base = gm
  modified_base 4: mod_base = um
  modified_base 5: mod_base = cm
  modified_base 6: mod_base = um
  modified_base 7: mod_base = OTHER; note = 2-fluororibose guanine
  modified_base 8: mod_base = OTHER; note = 2-O-methylribose adenine
  modified_base 9: mod_base = OTHER; note = 2-fluororibose cytosine
  modified_base 10: mod_base = OTHER; note = 2-fluororibose adenine
  modified_base 11: mod_base = OTHER; note = 2-fluororibose uracil
  modified_base 12: mod_base = cm
  modified_base 13: mod_base = OTHER; note = 2-O-methylribose adenine
  modified_base 14: mod_base = gm
  modified_base 15: mod_base = OTHER; note = 2-O-methylribose adenine
  modified_base 16: mod_base = OTHER; note = 2-O-methylribose adenine
  modified_base 17: mod_base = cm
  modified_base 18: mod_base = um
  modified_base 19: mod_base = um
  modified_base 20: mod_base = cm
  modified_base 20..21: mod_base = OTHER; note = phosphorothioate
  modified_base 21: mod_base = OTHER; note = 2-O-methylribose adenine
  source 1..21: mol_type = other RNA
aggtctgacatcagaacttca

SEQ ID NO: 750 - RNA, 21 nt, synthetic construct
  misc_feature 1..21: note = Synthetic: WV-42469
  misc_feature 1..21: note = Synthetic: SSR-0101672
  modified_base 1: mod_base = OTHER; note = 6-aminohexanol linked by phosphate to the 5' end of 2-O-methylribose uracil
  modified_base 1..2: mod_base = OTHER; note = phosphorothioate
  modified_base 2: mod_base = um
  modified_base 3: mod_base = gm
  modified_base 4: mod_base = gm
  modified_base 5: mod_base = gm
  modified_base 6: mod_base = OTHER; note = 2-O-methylribose adenine
  modified_base 7: mod_base = OTHER; note = 2-fluororibose adenine
  modified_base 8: mod_base = OTHER; note = 2-O-methylribose adenine
  modified_base 9: mod_base = OTHER; note = 2-fluororibose adenine
  modified_base 10: mod_base = OTHER; note = 2-fluororibose adenine
  modified_base 11: mod_base = OTHER; note = 2-fluororibose cytosine
  modified_base 12: mod_base = um
  modified_base 13: mod_base = gm
  modified_base 14: mod_base = gm
  modified_base 15: mod_base = um
  modified_base 16: mod_base = OTHER; note = 2-O-methylribose adenine
  modified_base 17: mod_base = um
  modified_base 18: mod_base = cm
  modified_base 19: mod_base = OTHER; note = 2-O-methylribose adenine
  modified_base 20: mod_base = OTHER; note = 2-O-methylribose adenine
  modified_base 20..21: mod_base = OTHER; note = phosphorothioate
  modified_base 21: mod_base = OTHER; note = 2-O-methylribose adenine
  source 1..21: mol_type = other RNA
ttgggaaaaactggtatcaaa

SEQ ID NO: 751 - RNA, 21 nt, synthetic construct
  misc_feature 1..21: note = Synthetic: WV-42470
  misc_feature 1..21: note = Synthetic: SSR-0101673
  modified_base 1: mod_base = OTHER; note = 6-aminohexanol linked by phosphate to the 5' end of 2-O-methylribose uracil
  modified_base 1..2: mod_base = OTHER; note = phosphorothioate
  modified_base 2: mod_base = gm
  modified_base 3: mod_base = gm
  modified_base 4: mod_base = gm
  modified_base 5: mod_base = OTHER; note = 2-O-methylribose adenine
  modified_base 6: mod_base = OTHER; note = 2-O-methylribose adenine
  modified_base 7: mod_base = OTHER; note = 2-fluororibose adenine
  modified_base 8: mod_base = OTHER; note = 2-O-methylribose adenine
  modified_base 9: mod_base = OTHER; note = 2-fluororibose adenine
  modified_base 10: mod_base = OTHER; note = 2-fluororibose cytosine
  modified_base 11: mod_base = OTHER; note = 2-fluororibose uracil
  modified_base 12: mod_base = gm
  modified_base 13: mod_base = gm
  modified_base 14: mod_base = um
  modified_base 15: mod_base = OTHER; note = 2-O-methylribose adenine
  modified_base 16: mod_base = um
  modified_base 17: mod_base = cm
  modified_base 18: mod_base = OTHER; note = 2-O-methylribose adenine
  modified_base 19: mod_base = OTHER; note = 2-O-methylribose adenine
  modified_base 20: mod_base = OTHER; note = 2-O-methylribose adenine
  modified_base 20..21: mod_base = OTHER; note = phosphorothioate
  modified_base 21: mod_base = OTHER; note = 2-O-methylribose adenine
  source 1..21: mol_type = other RNA
tgggaaaaactggtatcaaaa

SEQ ID NO: 752 - RNA, 21 nt, synthetic construct
  misc_feature 1..21: note = Synthetic: WV-42471
  misc_feature 1..21: note = Synthetic: SSR-0101674
  modified_base 1: mod_base = OTHER; note = 6-aminohexanol linked by phosphate to the 5' end of 2-O-methylribose uracil
  modified_base 1..2: mod_base = OTHER; note = phosphorothioate
  modified_base 2: mod_base = gm
  modified_base 3: mod_base = gm
  modified_base 4: mod_base = um
  modified_base 5: mod_base = OTHER; note = 2-O-methylribose adenine
  modified_base 6: mod_base = um
  modified_base 7: mod_base = OTHER; note = 2-fluororibose cytosine
  modified_base 8: mod_base = OTHER; note = 2-O-methylribose adenine
  modified_base 9: mod_base = OTHER; note = 2-fluororibose adenine
  modified_base 10: mod_base = OTHER; note = 2-fluororibose adenine
  modified_base 11: mod_base = OTHER; note = 2-fluororibose adenine
  modified_base 12: mod_base = cm
  modified_base 13: mod_base = cm
  modified_base 14: mod_base = um
  modified_base 15: mod_base = cm
  modified_base 16: mod_base = OTHER; note = 2-O-methylribose adenine
  modified_base 17: mod_base = um
  modified_base 18: mod_base = gm
  modified_base 19: mod_base = um
  modified_base 20: mod_base = cm
  modified_base 20..21: mod_base = OTHER; note = phosphorothioate
  modified_base 21: mod_base = OTHER; note = 2-O-methylribose adenine
  source 1..21: mol_type = other RNA
tggtatcaaaacctcatgtca

SEQ ID NO: 753 - RNA, 21 nt, synthetic construct
  misc_feature 1..21: note = Synthetic: WV-42472
  misc_feature 1..21: note = Synthetic: SSR-0101675
  modified_base 1: mod_base = OTHER; note = 6-aminohexanol linked by phosphate to the 5' end of 2-O-methylribose adenine
  modified_base 1..2: mod_base = OTHER; note = phosphorothioate
  modified_base 2: mod_base = gm
  modified_base 3: mod_base = cm
  modified_base 4: mod_base = OTHER; note = 2-O-methylribose adenine
  modified_base 5: mod_base = cm
  modified_base 6: mod_base = OTHER; note = 2-O-methylribose adenine
  modified_base 7: mod_base = OTHER; note = 2-fluororibose adenine
  modified_base 8: mod_base = gm
  modified_base 9: mod_base = OTHER; note = 2-fluororibose adenine
  modified_base 10: mod_base = OTHER; note = 2-fluororibose uracil
  modified_base 11: mod_base = OTHER; note = 2-fluororibose uracil
  modified_base 12: mod_base = OTHER; note = 2-O-methylribose adenine
  modified_base 13: mod_base = um
  modified_base 14: mod_base = gm
  modified_base 15: mod_base = gm
  modified_base 16: mod_base = cm
  modified_base 17: mod_base = cm
  modified_base 18: mod_base = um
  modified_base 19: mod_base = gm
  modified_base 20: mod_base = um
  modified_base 20..21: mod_base = OTHER; note = phosphorothioate
  modified_base 21: mod_base = OTHER; note = 2-O-methylribose adenine
  source 1..21: mol_type = other RNA
agcacaagattatggcctgta

SEQ ID NO: 754 - RNA, 21 nt, synthetic construct
  misc_feature 1..21: note = Synthetic: WV-42473
  misc_feature 1..21: note = Synthetic: SSR-0101676
  modified_base 1: mod_base = OTHER; note = 6-aminohexanol linked by phosphate to the 5' end of 2-O-methylribose guanine
  modified_base 1..2: mod_base = OTHER; note = phosphorothioate
  modified_base 2: mod_base = cm
  modified_base 3: mod_base = OTHER; note = 2-O-methylribose adenine
  modified_base 4: mod_base = cm
  modified_base 5: mod_base = OTHER; note = 2-O-methylribose adenine
  modified_base 6: mod_base = OTHER; note = 2-O-methylribose adenine
  modified_base 7: mod_base = OTHER; note = 2-fluororibose guanine
  modified_base 8: mod_base = OTHER; note = 2-O-methylribose adenine
  modified_base 9: mod_base = OTHER; note = 2-fluororibose uracil
  modified_base 10: mod_base = OTHER; note = 2-fluororibose uracil
  modified_base 11: mod_base = OTHER; note = 2-fluororibose adenine
  modified_base 12: mod_base = um
  modified_base 13: mod_base = gm
  modified_base 14: mod_base = gm
  modified_base 15: mod_base = cm
  modified_base 16: mod_base = cm
  modified_base 17: mod_base = um
  modified_base 18: mod_base = gm
  modified_base 19: mod_base = um
  modified_base 20: mod_base = OTHER; note = 2-O-methylribose adenine
  modified_base 20..21: mod_base = OTHER; note = phosphorothioate
  modified_base 21: mod_base = OTHER; note = 2-O-methylribose adenine
  source 1..21: mol_type = other RNA
gcacaagattatggcctgtaa

SEQ ID NO: 755 - RNA, 21 nt, synthetic construct
  misc_feature 1..21: note = Synthetic: WV-42474
  misc_feature 1..21: note = Synthetic: SSR-0101677
  modified_base 1: mod_base = OTHER; note = 6-aminohexanol linked by phosphate to the 5' end of 2-O-methylribose adenine
  modified_base 1..2: mod_base = OTHER; note = phosphorothioate
  modified_base 2: mod_base = OTHER; note = 2-O-methylribose adenine
  modified_base 3: mod_base = gm
  modified_base 4: mod_base = OTHER; note = 2-O-methylribose adenine
  modified_base 5: mod_base = um
  modified_base 6: mod_base = um
  modified_base 7: mod_base = OTHER; note = 2-fluororibose adenine
  modified_base 8: mod_base = um
  modified_base 9: mod_base = OTHER; note = 2-fluororibose guanine
  modified_base 10: mod_base = OTHER; note = 2-fluororibose guanine
  modified_base 11: mod_base = OTHER; note = 2-fluororibose cytosine
  modified_base 12: mod_base = cm
  modified_base 13: mod_base = um
  modified_base 14: mod_base = gm
  modified_base 15: mod_base = um
  modified_base 16: mod_base = OTHER; note = 2-O-methylribose adenine
  modified_base 17: mod_base = um
  modified_base 18: mod_base = um
  modified_base 19: mod_base = gm
  modified_base 20: mod_base = gm
  modified_base 20..21: mod_base = OTHER; note = phosphorothioate
  modified_base 21: mod_base = OTHER; note = 2-O-methylribose adenine
  source 1..21: mol_type = other RNA
aagattatggcctgtattgga

SEQ ID NO: 756 - RNA, 21 nt, synthetic construct
  misc_feature 1..21: note = Synthetic: WV-42475
  misc_feature 1..21: note = Synthetic: SSR-0101678
  modified_base 1: mod_base = OTHER; note = 6-aminohexanol linked by phosphate to the 5' end of 2-O-methylribose adenine
  modified_base 1..2: mod_base = OTHER; note = phosphorothioate
  modified_base 2: mod_base = cm
  modified_base 3: mod_base = OTHER; note = 2-O-methylribose adenine
  modified_base 4: mod_base = gm
  modified_base 5: mod_base = OTHER; note = 2-O-methylribose adenine
  modified_base 6: mod_base = um
  modified_base 7: mod_base = OTHER; note = 2-fluororibose guanine
  modified_base 8: mod_base = OTHER; note = 2-O-methylribose adenine
  modified_base 9: mod_base = OTHER; note = 2-fluororibose adenine
  modified_base 10: mod_base = OTHER; note = 2-fluororibose guanine
  modified_base 11: mod_base = OTHER; note = 2-fluororibose uracil
  modified_base 12: mod_base = cm
  modified_base 13: mod_base = gm
  modified_base 14: mod_base = um
  modified_base 15: mod_base = OTHER; note = 2-O-methylribose adenine
  modified_base 16: mod_base = OTHER; note = 2-O-methylribose adenine
  modified_base 17: mod_base = gm
  modified_base 18: mod_base = OTHER; note = 2-O-methylribose adenine
  modified_base 19: mod_base = OTHER; note = 2-O-methylribose adenine
  modified_base 20: mod_base = gm
  modified_base 20..21: mod_base = OTHER; note = phosphorothioate
  modified_base 21: mod_base = OTHER; note = 2-O-methylribose adenine
  source 1..21: mol_type = other RNA
acagatgaagtcgtaagaaga

SEQ ID NO: 757 - RNA, 21 nt, synthetic construct
  misc_feature 1..21: note = Synthetic: WV-42476
  misc_feature 1..21: note = Synthetic: SSR-0101679
  modified_base 1: mod_base = OTHER; note = 6-aminohexanol linked by phosphate to the 5' end of 2-O-methylribose uracil
  modified_base 1..2: mod_base = OTHER; note = phosphorothioate
  modified_base 2: mod_base = OTHER; note = 2-O-methylribose adenine
  modified_base 3: mod_base = OTHER; note = 2-O-methylribose adenine
  modified_base 4: mod_base = gm
  modified_base 5: mod_base = OTHER; note = 2-O-methylribose adenine
  modified_base 6: mod_base = OTHER; note = 2-O-methylribose adenine
  modified_base 7: mod_base = OTHER; note = 2-fluororibose guanine
  modified_base 8: mod_base = um
  modified_base 9: mod_base = OTHER; note = 2-fluororibose cytosine
  modified_base 10: mod_base = OTHER; note = 2-fluororibose uracil
  modified_base 11: mod_base = OTHER; note = 2-fluororibose guanine
  modified_base 12: mod_base = OTHER; note = 2-O-methylribose adenine
  modified_base 13: mod_base = um
  modified_base 14: mod_base = OTHER; note = 2-O-methylribose adenine
  modified_base 15: mod_base = gm
  modified_base 16: mod_base = OTHER; note = 2-O-methylribose adenine
  modified_base 17: mod_base = um
  modified_base 18: mod_base = gm
  modified_base 19: mod_base = gm
  modified_base 20: mod_base = OTHER; note = 2-O-methylribose adenine
  modified_base 20..21: mod_base = OTHER; note = phosphorothioate
  modified_base 21: mod_base = OTHER; note = 2-O-methylribose adenine
  source 1..21: mol_type = other RNA
taagaagtctgatagatggaa

SEQ ID NO: 758 - RNA, 21 nt, synthetic construct
  misc_feature 1..21: note = Synthetic: WV-42477
  misc_feature 1..21: note = Synthetic: SSR-0101680
  modified_base 1: mod_base = OTHER; note = 6-aminohexanol linked by phosphate to the 5' end of 2-O-methylribose adenine
  modified_base 1..2: mod_base = OTHER; note = phosphorothioate
  modified_base 2: mod_base = gm
  modified_base 3: mod_base = um
  modified_base 4: mod_base = cm
  modified_base 5: mod_base = um
  modified_base 6: mod_base = gm
  modified_base 7: mod_base = OTHER; note = 2-fluororibose adenine
  modified_base 8: mod_base = um
  modified_base 9: mod_base = OTHER; note = 2-fluororibose adenine
  modified_base 10: mod_base = OTHER; note = 2-fluororibose guanine
  modified_base 11: mod_base = OTHER; note = 2-fluororibose adenine
  modified_base 12: mod_base = um
  modified_base 13: mod_base = gm
  modified_base 14: mod_base = gm
  modified_base 15: mod_base = OTHER; note = 2-O-methylribose adenine
  modified_base 16: mod_base = OTHER; note = 2-O-methylribose adenine
  modified_base 17: mod_base = um
  modified_base 18: mod_base = OTHER; note = 2-O-methylribose adenine
  modified_base 19: mod_base = cm
  modified_base 20: mod_base = um
  modified_base 20..21: mod_base = OTHER; note = phosphorothioate
  modified_base 21: mod_base = OTHER; note = 2-O-methylribose adenine
  source 1..21: mol_type = other RNA
agtctgatagatggaatacta

SEQ ID NO: 759 - RNA, 21 nt, synthetic construct
  misc_feature 1..21: note = Synthetic: WV-42478
  misc_feature 1..21: note = Synthetic: SSR-0101681
  modified_base 1: mod_base = OTHER; note = 6-aminohexanol linked by phosphate to the 5' end of 2-O-methylribose guanine
  modified_base 1..2: mod_base = OTHER; note = phosphorothioate
  modified_base 2: mod_base = um
  modified_base 3: mod_base = cm
  modified_base 4: mod_base = um
  modified_base 5: mod_base = gm
  modified_base 6: mod_base = OTHER; note = 2-O-methylribose adenine
  modified_base 7: mod_base = OTHER; note = 2-fluororibose uracil
  modified_base 8: mod_base = OTHER; note = 2-O-methylribose adenine
  modified_base 9: mod_base = OTHER; note = 2-fluororibose guanine
  modified_base 10: mod_base = OTHER; note = 2-fluororibose adenine
  modified_base 11: mod_base = OTHER; note = 2-fluororibose uracil
  modified_base 12: mod_base = gm
  modified_base 13: mod_base = gm
  modified_base 14: mod_base = OTHER; note = 2-O-methylribose adenine
  modified_base 15: mod_base = OTHER; note = 2-O-methylribose adenine
  modified_base 16: mod_base = um
  modified_base 17: mod_base = OTHER; note = 2-O-methylribose adenine
  modified_base 18: mod_base = cm
  modified_base 19: mod_base = um
  modified_base 20: mod_base = um
  modified_base 20..21: mod_base = OTHER; note = phosphorothioate
  modified_base 21: mod_base = OTHER; note = 2-O-methylribose adenine
  source 1..21: mol_type = other RNA
gtctgatagatggaatactta

SEQ ID NO: 760 - RNA, 21 nt, synthetic construct
  misc_feature 1..21: note = Synthetic: WV-42479
  misc_feature 1..21: note = Synthetic: SSR-0101682
  modified_base 1: mod_base = OTHER; note = 6-aminohexanol linked by phosphate to the 5' end of 2-O-methylribose uracil
  modified_base 1..2: mod_base = OTHER; note = phosphorothioate
  modified_base 2: mod_base = OTHER; note = 2-O-methylribose adenine
  modified_base 3: mod_base = gm
  modified_base 4: mod_base = OTHER; note = 2-O-methylribose adenine
  modified_base 5: mod_base = um
  modified_base 6: mod_base = gm
  modified_base 7: mod_base = OTHER; note = 2-fluororibose guanine
  modified_base 8: mod_base = OTHER; note = 2-O-methylribose adenine
  modified_base 9: mod_base = OTHER; note = 2-fluororibose adenine
  modified_base 10: mod_base = OTHER; note = 2-fluororibose uracil
  modified_base 11: mod_base = OTHER; note = 2-fluororibose adenine
  modified_base 12: mod_base = cm
  modified_base 13: mod_base = um
  modified_base 14: mod_base = um
  modified_base 15: mod_base = OTHER; note = 2-O-methylribose adenine
  modified_base 16: mod_base = cm
  modified_base 17: mod_base = cm
  modified_base 18: mod_base = OTHER; note = 2-O-methylribose adenine
  modified_base 19: mod_base = OTHER; note = 2-O-methylribose adenine
  modified_base 20: mod_base = um
  modified_base 20..21: mod_base = OTHER; note = phosphorothioate
  modified_base 21: mod_base = OTHER; note = 2-O-methylribose adenine
  source 1..21: mol_type = other RNA
tagatggaatacttaccaata

SEQ ID NO: 761 - RNA, 21 nt, synthetic construct
  misc_feature 1..21: note = Synthetic: WV-42480
  misc_feature 1..21: note = Synthetic: SSR-0101683
  modified_base 1: mod_base = OTHER; note = 6-aminohexanol linked by phosphate to the 5' end of 2-O-methylribose adenine
  modified_base 1..2: mod_base = OTHER; note = phosphorothioate
  modified_base 2: mod_base = gm
  modified_base 3: mod_base = OTHER; note = 2-O-methylribose adenine
  modified_base 4: mod_base = um
  modified_base 5: mod_base = gm
  modified_base 6: mod_base = gm
  modified_base 7: mod_base = OTHER; note = 2-fluororibose adenine
  modified_base 8: mod_base = OTHER; note = 2-O-methylribose adenine
  modified_base 9: mod_base = OTHER; note = 2-fluororibose uracil
  modified_base 10: mod_base = OTHER; note = 2-fluororibose adenine
  modified_base 11: mod_base = OTHER; note = 2-fluororibose cytosine
  modified_base 12: mod_base = um
  modified_base 13: mod_base = um
  modified_base 14: mod_base = OTHER; note = 2-O-methylribose adenine
  modified_base 15: mod_base = cm
  modified_base 16: mod_base = cm
  modified_base 17: mod_base = OTHER; note = 2-O-methylribose adenine
  modified_base 18: mod_base = OTHER; note = 2-O-methylribose adenine
  modified_base 19: mod_base = um
  modified_base 20: mod_base = OTHER; note = 2-O-methylribose adenine
  modified_base 20..21: mod_base = OTHER; note = phosphorothioate
  modified_base 21: mod_base = OTHER; note = 2-O-methylribose adenine
  source 1..21: mol_type = other RNA
agatggaatacttaccaataa

SEQ ID NO: 762 - RNA, 21 nt, synthetic construct
  misc_feature 1..21: note = Synthetic: WV-42481
  misc_feature 1..21: note = Synthetic: SSR-0101684
  modified_base 1: mod_base = OTHER; note = 6-aminohexanol linked by phosphate to the 5' end of 2-O-methylribose adenine
  modified_base 1..2: mod_base = OTHER; note = phosphorothioate
  modified_base 2: mod_base = um
  modified_base 3: mod_base = gm
  modified_base 4: mod_base = gm
  modified_base 5: mod_base = OTHER; note = 2-O-methylribose adenine
  modified_base 6: mod_base = OTHER; note = 2-O-methylribose adenine
  modified_base 7: mod_base = OTHER; note = 2-fluororibose uracil
  modified_base 8: mod_base = OTHER; note = 2-O-methylribose adenine
  modified_base 9: mod_base = OTHER; note = 2-fluororibose cytosine
  modified_base 10: mod_base = OTHER; note = 2-fluororibose uracil
  modified_base 11: mod_base = OTHER; note = 2-fluororibose uracil
  modified_base 12: mod_base = OTHER; note = 2-O-methylribose adenine
  modified_base 13: mod_base = cm
  modified_base 14: mod_base = cm
  modified_base 15: mod_base = OTHER; note = 2-O-methylribose adenine
  modified_base 16: mod_base = OTHER; note = 2-O-methylribose adenine
  modified_base 17: mod_base = um
  modified_base 18: mod_base = OTHER; note = 2-O-methylribose adenine
  modified_base 19: mod_base = OTHER; note = 2-O-methylribose adenine
  modified_base 20: mod_base = gm
  modified_base 20..21: mod_base = OTHER; note = phosphorothioate
  modified_base 21: mod_base = OTHER; note = 2-O-methylribose adenine
  source 1..21: mol_type = other RNA
atggaatacttaccaataaga

SEQ ID NO: 763 - RNA, 21 nt, synthetic construct
  misc_feature 1..21: note = Synthetic: WV-42482
  misc_feature 1..21: note = Synthetic: SSR-0101685
  modified_base 1: mod_base = OTHER; note = 6-aminohexanol linked by phosphate to the 5' end of 2-O-methylribose uracil
  modified_base 1..2: mod_base = OTHER; note = phosphorothioate
  modified_base 2: mod_base = gm
  modified_base 3: mod_base = gm
  modified_base 4: mod_base = OTHER; note = 2-O-methylribose adenine
  modified_base 5: mod_base = OTHER; note = 2-O-methylribose adenine
  modified_base 6: mod_base = um
  modified_base 7: mod_base = OTHER; note = 2-fluororibose adenine
  modified_base 8: mod_base = cm
  modified_base 9: mod_base = OTHER; note = 2-fluororibose uracil
  modified_base 10: mod_base = OTHER; note = 2-fluororibose uracil
  modified_base 11: mod_base = OTHER; note = 2-fluororibose adenine
  modified_base 12: mod_base = cm
  modified_base 13: mod_base = cm
  modified_base 14: mod_base = OTHER; note = 2-O-methylribose adenine
  modified_base 15: mod_base = OTHER; note = 2-O-methylribose adenine
  modified_base 16: mod_base = um
  modified_base 17: mod_base = OTHER; note = 2-O-methylribose adenine
  modified_base 18: mod_base = OTHER; note = 2-O-methylribose adenine
  modified_base 19: mod_base = gm
  modified_base 20: mod_base = OTHER; note = 2-O-methylribose adenine
  modified_base 20..21: mod_base = OTHER; note = phosphorothioate
  modified_base 21: mod_base = OTHER; note = 2-O-methylribose adenine
  source 1..21: mol_type = other RNA
tggaatacttaccaataagaa

SEQ ID NO: 764 - RNA, 21 nt, synthetic construct
  misc_feature 1..21: note = Synthetic: WV-42483
  misc_feature 1..21: note = Synthetic: SSR-0101686
  modified_base 1: mod_base = OTHER; note = 6-aminohexanol linked by phosphate to the 5' end of 2-O-methylribose adenine
  modified_base 1..2: mod_base = OTHER; note = phosphorothioate
  modified_base 2: mod_base = cm
  modified_base 3: mod_base = cm
  modified_base 4: mod_base = OTHER; note = 2-O-methylribose adenine
  modified_base 5: mod_base = OTHER; note = 2-O-methylribose adenine
  modified_base 6: mod_base = um
  modified_base 7: mod_base = OTHER; note = 2-fluororibose adenine
  modified_base 8: mod_base = OTHER; note = 2-O-methylribose adenine
  modified_base 9: mod_base = OTHER; note = 2-fluororibose guanine
  modified_base 10: mod_base = OTHER; note = 2-fluororibose adenine
  modified_base 11: mod_base = OTHER; note = 2-fluororibose adenine
  modified_base 12: mod_base = OTHER; note = 2-O-methylribose adenine
  modified_base 13: mod_base = OTHER; note = 2-O-methylribose adenine
  modified_base 14: mod_base = um
  modified_base 15: mod_base = gm
  modified_base 16: mod_base = OTHER; note = 2-O-methylribose adenine
  modified_base 17: mod_base = um
  modified_base 18: mod_base = um
  modified_base 19: mod_base = um
  modified_base 20: mod_base = um
  modified_base 20..21: mod_base = OTHER; note = phosphorothioate
  modified_base 21: mod_base = OTHER; note = 2-O-methylribose adenine
  source 1..21: mol_type = other RNA
accaataagaaaatgatttta

SEQ ID NO: 765 - RNA, 21 nt, synthetic construct
  misc_feature 1..21: note = Synthetic: WV-42484
  misc_feature 1..21: note = Synthetic: SSR-0101687
  modified_base 1: mod_base = OTHER; note = 6-aminohexanol linked by phosphate to the 5' end of 2-O-methylribose guanine
  modified_base 1..2: mod_base = OTHER; note = phosphorothioate
  modified_base 2: mod_base = cm
  modified_base 3: mod_base = cm
  modified_base 4: mod_base = cm
  modified_base 5: mod_base = OTHER; note = 2-O-methylribose adenine
  modified_base 6: mod_base = OTHER; note = 2-O-methylribose adenine
  modified_base 7: mod_base = OTHER; note = 2-fluororibose adenine
  modified_base 8: mod_base = OTHER; note = 2-O-methylribose adenine
  modified_base 9: mod_base = OTHER; note = 2-fluororibose cytosine
  modified_base 10: mod_base = OTHER; note = 2-fluororibose guanine
  modified_base 11: mod_base = OTHER; note = 2-fluororibose guanine
  modified_base 12: mod_base = um
  modified_base 13: mod_base = gm
  modified_base 14: mod_base = cm
  modified_base 15: mod_base = OTHER; note = 2-O-methylribose adenine
  modified_base 16: mod_base = OTHER; note = 2-O-methylribose adenine
  modified_base 17: mod_base = cm
  modified_base 18: mod_base = um
  modified_base 19: mod_base = cm
  modified_base 20: mod_base = um
  modified_base 20..21: mod_base = OTHER; note = phosphorothioate
  modified_base 21: mod_base = OTHER; note = 2-O-methylribose adenine
  source 1..21: mol_type = other RNA
gcccaaaacggtgcaactcta

SEQ ID NO: 766 - RNA, 21 nt, synthetic construct
  misc_feature 1..21: note = Synthetic: WV-42485
  misc_feature 1..21: note = Synthetic: SSR-0101688
  modified_base 1: mod_base = OTHER; note = 6-aminohexanol linked by phosphate to the 5' end of 2-O-methylribose guanine
  modified_base 1..2: mod_base = OTHER; note = phosphorothioate
  modified_base 2: mod_base = um
  modified_base 3: mod_base = gm
  modified_base 4: mod_base = cm
  modified_base 5: mod_base = OTHER; note = 2-O-methylribose adenine
  modified_base 6: mod_base = OTHER; note = 2-O-methylribose adenine
  modified_base 7: mod_base = OTHER; note = 2-fluororibose cytosine
  modified_base 8: mod_base = um
  modified_base 9: mod_base = OTHER; note = 2-fluororibose cytosine
  modified_base 10: mod_base = OTHER; note = 2-fluororibose uracil
  modified_base 11: mod_base = OTHER; note = 2-fluororibose adenine
  modified_base 12: mod_base = um
  modified_base 13: mod_base = um
  modified_base 14: mod_base = cm
  modified_base 15: mod_base = um
  modified_base 16: mod_base = gm
  modified_base 17: mod_base = gm
  modified_base 18: mod_base = OTHER; note = 2-O-methylribose adenine
  modified_base 19: mod_base = cm
  modified_base 20: mod_base = um
  modified_base 20..21: mod_base = OTHER; note = phosphorothioate
  modified_base 21: mod_base = OTHER; note = 2-O-methylribose adenine
  source 1..21: mol_type = other RNA
gtgcaactctattctggacta

SEQ ID NO: 767 - RNA, 21 nt, synthetic construct
  misc_feature 1..21: note = Synthetic: WV-42531
  misc_feature 1..21: note = Synthetic: SSR-0106348
  modified_base 1: mod_base = OTHER; note = mono GalNAc C5-amino-C6-pyrrolidine linked by phosphate to mono GalNAc C5-amino-C6-pyrrolidine linked by phosphate the 5' end of 2-O-methylribose adenine
  modified_base 1..2: mod_base = OTHER; note = phosphorothioate
  modified_base 2: mod_base = gm
  modified_base 3: mod_base = OTHER; note = 2-O-methylribose adenine
  modified_base 4: mod_base = gm
  modified_base 5: mod_base = cm
  modified_base 6: mod_base = OTHER; note = 2-O-methylribose adenine
  modified_base 7: mod_base = OTHER; note = 2-fluororibose adenine
  modified_base 8: mod_base = OTHER; note = 2-O-methylribose adenine
  modified_base 9: mod_base = OTHER; note = 2-fluororibose guanine
  modified_base 10: mod_base = OTHER; note = 2-fluororibose cytosine
  modified_base 11: mod_base = OTHER; note = 2-fluororibose cytosine
  modified_base 12: mod_base = OTHER; note = 2-O-methylribose adenine
  modified_base 13: mod_base = um
  modified_base 14: mod_base = gm
  modified_base 15: mod_base = OTHER; note = 2-O-methylribose adenine
  modified_base 16: mod_base = OTHER; note = 2-O-methylribose adenine
  modified_base 17: mod_base = cm
  modified_base 18: mod_base = OTHER; note = 2-O-methylribose adenine
  modified_base 19: mod_base = um
  modified_base 20: mod_base = cm
  modified_base 20..21: mod_base = OTHER; note = phosphorothioate
  modified_base 21: mod_base = OTHER; note = 2-O-methylribose adenine
  source 1..21: mol_type = other RNA
agagcaaagccatgaacatca

SEQ ID NO: 768 - RNA, 21 nt, synthetic construct
  misc_feature 1..21: note = Synthetic: WV-42532
  misc_feature 1..21: note = Synthetic: SSR-0106349
  modified_base 1: mod_base = OTHER; note = mono GalNAc C5-amino-C6-pyrrolidine linked by phosphate to mono GalNAc C5-amino-C6-pyrrolidine linked by phosphate the 5' end of 2-O-methylribose adenine
  modified_base 1..2: mod_base = OTHER; note = phosphorothioate
  modified_base 2: mod_base = OTHER; note = 2-O-methylribose adenine
  modified_base 3: mod_base = OTHER; note = 2-O-methylribose adenine
  modified_base 4: mod_base = gm
  modified_base 5: mod_base = cm
  modified_base 6: mod_base = cm
  modified_base 7: mod_base = OTHER; note = 2-fluororibose adenine
  modified_base 8: mod_base = um
  modified_base 9: mod_base = OTHER; note = 2-fluororibose guanine
  modified_base 10: mod_base = OTHER; note = 2-fluororibose adenine
  modified_base 11: mod_base = OTHER; note = 2-fluororibose adenine
  modified_base 12: mod_base = cm
  modified_base 13: mod_base = OTHER; note = 2-O-methylribose adenine
  modified_base 14: mod_base = um
  modified_base 15: mod_base = cm
  modified_base 16: mod_base = OTHER; note = 2-O-methylribose adenine
  modified_base 17: mod_base = um
  modified_base 18: mod_base = cm
  modified_base 19: mod_base = cm
  modified_base 20: mod_base = um
  modified_base 20..21: mod_base = OTHER; note = phosphorothioate
  modified_base 21: mod_base = OTHER; note = 2-O-methylribose adenine
  source 1..21: mol_type = other RNA
aaagccatgaacatcatccta

SEQ ID NO: 769 - RNA, 21 nt, synthetic construct
  misc_feature 1..21: note = Synthetic: WV-42533
  misc_feature 1..21: note = Synthetic: SSR-0106350
  modified_base 1: mod_base = OTHER; note = mono GalNAc C5-amino-C6-pyrrolidine linked by phosphate to mono GalNAc C5-amino-C6-pyrrolidine linked by phosphate the 5' end of 2-O-methylribose cytosine
  modified_base 1..2: mod_base = OTHER; note = phosphorothioate
  modified_base 2: mod_base = OTHER; note = 2-O-methylribose adenine
  modified_base 3: mod_base = um
  modified_base 4: mod_base = gm
  modified_base 5: mod_base = OTHER; note = 2-O-methylribose adenine
  modified_base 6: mod_base = OTHER; note = 2-O-methylribose adenine
  modified_base 7: mod_base = OTHER; note = 2-fluororibose cytosine
  modified_base 8: mod_base = OTHER; note = 2-O-methylribose adenine
  modified_base 9: mod_base = OTHER; note = 2-fluororibose uracil
  modified_base 10: mod_base = OTHER; note = 2-fluororibose cytosine
  modified_base 11: mod_base = OTHER; note = 2-fluororibose adenine
  modified_base 12: mod_base = um
  modified_base 13: mod_base = cm
  modified_base 14: mod_base = cm
  modified_base 15: mod_base = um
  modified_base 16: mod_base = OTHER; note = 2-O-methylribose adenine
  modified_base 17: mod_base = gm
  modified_base 18: mod_base = OTHER; note = 2-O-methylribose adenine
  modified_base 19: mod_base = OTHER; note = 2-O-methylribose adenine
  modified_base 20: mod_base = OTHER; note = 2-O-methylribose adenine
  modified_base 20..21: mod_base = OTHER; note = phosphorothioate
  modified_base 21: mod_base = OTHER; note = 2-O-methylribose adenine
  source 1..21: mol_type = other RNA
catgaacatcatcctagaaaa

SEQ ID NO: 770 - RNA, 21 nt, synthetic construct
  misc_feature 1..21: note = Synthetic: WV-42534
  misc_feature 1..21: note = Synthetic: SSR-0106351
  modified_base 1: mod_base = OTHER; note = mono GalNAc C5-amino-C6-pyrrolidine linked by phosphate to mono GalNAc C5-amino-C6-pyrrolidine linked by phosphate the 5' end of 2-O-methylribose adenine
  modified_base 1..2: mod_base = OTHER; note = phosphorothioate
  modified_base 2: mod_base = OTHER; note = 2-O-methylribose adenine
  modified_base 3: mod_base = cm
  modified_base 4: mod_base = OTHER; note = 2-O-methylribose adenine
  modified_base 5: mod_base = um
  modified_base 6: mod_base = cm
  modified_base 7: mod_base = OTHER; note = 2-fluororibose adenine
  modified_base 8: mod_base = um
  modified_base 9: mod_base = OTHER; note = 2-fluororibose cytosine
  modified_base 10: mod_base = OTHER; note = 2-fluororibose cytosine
  modified_base 11: mod_base = OTHER; note = 2-fluororibose uracil
  modified_base 12: mod_base = OTHER; note = 2-O-methylribose adenine
  modified_base 13: mod_base = gm
  modified_base 14: mod_base = OTHER; note = 2-O-methylribose adenine
  modified_base 15: mod_base = OTHER; note = 2-O-methylribose adenine
  modified_base 16: mod_base = OTHER; note = 2-O-methylribose adenine
  modified_base 17: mod_base = um
  modified_base 18: mod_base = cm
  modified_base 19: mod_base = cm
  modified_base 20: mod_base = um
  modified_base 20..21: mod_base = OTHER; note = phosphorothioate
  modified_base 21: mod_base = OTHER; note = 2-O-methylribose adenine
  source 1..21: mol_type = other RNA
aacatcatcctagaaatccta

SEQ ID NO: 771 - RNA, 21 nt, synthetic construct
  misc_feature 1..21: note = Synthetic: WV-42535
  misc_feature 1..21: note = Synthetic: SSR-0106352
  modified_base 1: mod_base = OTHER; note = mono GalNAc C5-amino-C6-pyrrolidine linked by phosphate to mono GalNAc C5-amino-C6-pyrrolidine linked by phosphate the 5' end of 2-O-methylribose adenine
  modified_base 1..2: mod_base = OTHER; note = phosphorothioate
  modified_base 2: mod_base = um
  modified_base 3: mod_base = cm
  modified_base 4: mod_base = cm
  modified_base 5: mod_base = um
  modified_base 6: mod_base = OTHER; note = 2-O-methylribose adenine
  modified_base 7: mod_base = OTHER; note = 2-fluororibose guanine
  modified_base 8: mod_base = OTHER; note = 2-O-methylribose adenine
  modified_base 9: mod_base = OTHER; note = 2-fluororibose adenine
  modified_base 10: mod_base = OTHER; note = 2-fluororibose adenine
  modified_base 11: mod_base = OTHER; note = 2-fluororibose uracil
  modified_base 12: mod_base = cm
  modified_base 13: mod_base = cm
  modified_base 14: mod_base = um
  modified_base 15: mod_base = um
  modified_base 16: mod_base = cm
  modified_base 17: mod_base = um
  modified_base 18: mod_base = gm
  modified_base 19: mod_base = cm
  modified_base 20: mod_base = um
  modified_base 20..21: mod_base = OTHER; note = phosphorothioate
  modified_base 21: mod_base = OTHER; note = 2-O-methylribose adenine
  source 1..21: mol_type = other RNA
atcctagaaatccttctgcta

SEQ ID NO: 772 - RNA, 21 nt, synthetic construct
  misc_feature 1..21: note = Synthetic: WV-42536
  misc_feature 1..21: note = Synthetic: SSR-0106353
  modified_base 1: mod_base = OTHER; note = mono GalNAc C5-amino-C6-pyrrolidine linked by phosphate to mono GalNAc C5-amino-C6-pyrrolidine linked by phosphate the 5' end of 2-O-methylribose cytosine
  modified_base 1..2: mod_base = OTHER; note = phosphorothioate
  modified_base 2: mod_base = cm
  modified_base 3: mod_base = um
  modified_base 4: mod_base = OTHER; note = 2-O-methylribose adenine
  modified_base 5: mod_base = gm
  modified_base 6: mod_base = OTHER; note = 2-O-methylribose adenine
  modified_base 7: mod_base = OTHER; note = 2-fluororibose adenine
  modified_base 8: mod_base = OTHER; note = 2-O-methylribose adenine
  modified_base 9: mod_base = OTHER; note = 2-fluororibose uracil
  modified_base 10: mod_base = OTHER; note = 2-fluororibose cytosine
  modified_base 11: mod_base = OTHER; note = 2-fluororibose cytosine
  modified_base 12: mod_base = um
  modified_base 13: mod_base = um
  modified_base 14: mod_base = cm
  modified_base 15: mod_base = um
  modified_base 16: mod_base = gm
  modified_base 17: mod_base = cm
  modified_base 18: mod_base = um
  modified_base 19: mod_base = um
  modified_base 20: mod_base = cm
  modified_base 20..21: mod_base = OTHER; note = phosphorothioate
  modified_base 21: mod_base = OTHER; note = 2-O-methylribose adenine
  source 1..21: mol_type = other RNA
cctagaaatccttctgcttca

SEQ ID NO: 773 - RNA, 21 nt, synthetic construct
  misc_feature 1..21: note = Synthetic: WV-42537
  misc_feature 1..21: note = Synthetic: SSR-0106354
  modified_base 1: mod_base = OTHER; note = mono GalNAc C5-amino-C6-pyrrolidine linked by phosphate to mono GalNAc C5-amino-C6-pyrrolidine linked by phosphate the 5' end of 2-O-methylribose cytosine
  modified_base 1..2: mod_base = OTHER; note = phosphorothioate
  modified_base 2: mod_base = um
  modified_base 3: mod_base = gm
  modified_base 4: mod_base = cm
  modified_base 5: mod_base = um
  modified_base 6: mod_base = um
  modified_base 7: mod_base = OTHER; note = 2-fluororibose cytosine
  modified_base 8: mod_base = um
  modified_base 9: mod_base = OTHER; note = 2-fluororibose guanine
  modified_base 10: mod_base = OTHER; note = 2-fluororibose adenine
  modified_base 11: mod_base = OTHER; note = 2-fluororibose uracil
  modified_base 12: mod_base = cm
  modified_base 13: mod_base = OTHER; note = 2-O-methylribose adenine
  modified_base 14: mod_base = cm
  modified_base 15: mod_base = cm
  modified_base 16: mod_base = OTHER; note = 2-O-methylribose adenine
  modified_base 17: mod_base = um
  modified_base 18: mod_base = cm
  modified_base 19: mod_base = OTHER; note = 2-O-methylribose adenine
  modified_base 20: mod_base = um
  modified_base 20..21: mod_base = OTHER; note = phosphorothioate
  modified_base 21: mod_base = OTHER; note = 2-O-methylribose adenine
  source 1..21: mol_type = other RNA
ctgcttctgatcaccatcata

SEQ ID NO: 774 - RNA, 21 nt, synthetic construct
  misc_feature 1..21: note = Synthetic: WV-42538
  misc_feature 1..21: note = Synthetic: SSR-0106355
  modified_base 1: mod_base = OTHER; note = mono GalNAc C5-amino-C6-pyrrolidine linked by phosphate to mono GalNAc C5-amino-C6-pyrrolidine linked by phosphate the 5' end of 2-O-methylribose guanine
  modified_base 1..2: mod_base = OTHER; note = phosphorothioate
  modified_base 2: mod_base = cm
  modified_base 3: mod_base = um
  modified_base 4: mod_base = um
  modified_base 5: mod_base = cm
  modified_base 6: mod_base = um
  modified_base 7: mod_base = OTHER; note = 2-fluororibose guanine
  modified_base 8: mod_base = OTHER; note = 2-O-methylribose adenine
  modified_base 9: mod_base = OTHER; note = 2-fluororibose uracil
  modified_base 10: mod_base = OTHER; note = 2-fluororibose cytosine
  modified_base 11: mod_base = OTHER; note = 2-fluororibose adenine
  modified_base 12: mod_base = cm
  modified_base 13: mod_base = cm
  modified_base 14: mod_base = OTHER; note = 2-O-methylribose adenine
  modified_base 15: mod_base = um
  modified_base 16: mod_base = cm
  modified_base 17: mod_base = OTHER; note = 2-O-methylribose adenine
  modified_base 18: mod_base = um
  modified_base 19: mod_base = cm
  modified_base 20: mod_base = um
  modified_base 20..21: mod_base = OTHER; note = phosphorothioate
  modified_base 21: mod_base = OTHER; note = 2-O-methylribose adenine
  source 1..21: mol_type = other RNA
gcttctgatcaccatcatcta

SEQ ID NO: 775 - RNA, 21 nt, synthetic construct
  misc_feature 1..21: note = Synthetic: WV-42539
  misc_feature 1..21: note = Synthetic: SSR-0106356
  modified_base 1: mod_base = OTHER; note = mono GalNAc C5-amino-C6-pyrrolidine linked by phosphate to mono GalNAc C5-amino-C6-pyrrolidine linked by phosphate the 5' end of 2-O-methylribose guanine
  modified_base 1..2: mod_base = OTHER; note = phosphorothioate
  modified_base 2: mod_base = gm
  modified_base 3: mod_base = gm
  modified_base 4: mod_base = gm
  modified_base 5: mod_base = OTHER; note = 2-O-methylribose adenine
  modified_base 6: mod_base = gm
  modified_base 7: mod_base = OTHER; note = 2-fluororibose adenine
  modified_base 8: mod_base = um
  modified_base 9: mod_base = OTHER; note = 2-fluororibose uracil
  modified_base 10: mod_base = OTHER; note = 2-fluororibose guanine
  modified_base 11: mod_base = OTHER; note = 2-fluororibose uracil
  modified_base 12: mod_base = um
  modified_base 13: mod_base = cm
  modified_base 14: mod_base = um
  modified_base 15: mod_base = cm
  modified_base 16: mod_base = OTHER; note = 2-O-methylribose adenine
  modified_base 17: mod_base = um
  modified_base 18: mod_base = um
  modified_base 19: mod_base = OTHER; note = 2-O-methylribose adenine
  modified_base 20: mod_base = cm
  modified_base 20..21: mod_base = OTHER; note = phosphorothioate
  modified_base 21: mod_base = OTHER; note = 2-O-methylribose adenine
  source 1..21: mol_type = other RNA
ggggagattgttctcattaca

SEQ ID NO: 776 - RNA, 21 nt, synthetic construct
  misc_feature 1..21: note = Synthetic: WV-42540
  misc_feature 1..21: note = Synthetic: SSR-0106357
  modified_base 1: mod_base = OTHER; note = mono GalNAc C5-amino-C6-pyrrolidine linked by phosphate to mono GalNAc C5-amino-C6-pyrrolidine linked by phosphate the 5' end of 2-O-methylribose guanine
  modified_base 1..2: mod_base = OTHER; note = phosphorothioate
  modified_base 2: mod_base = gm
  modified_base 3: mod_base = gm
  modified_base 4: mod_base = OTHER; note = 2-O-methylribose adenine
  modified_base 5: mod_base = gm
  modified_base 6: mod_base = OTHER; note = 2-O-methylribose adenine
  modified_base 7: mod_base = OTHER; note = 2-fluororibose uracil
  modified_base 8: mod_base = um
  modified_base 9: mod_base = OTHER; note = 2-fluororibose guanine
  modified_base 10: mod_base = OTHER; note = 2-fluororibose uracil
  modified_base 11: mod_base = OTHER; note = 2-fluororibose uracil
  modified_base 12: mod_base = cm
  modified_base 13: mod_base = um
  modified_base 14: mod_base = cm
  modified_base 15: mod_base = OTHER; note = 2-O-methylribose adenine
  modified_base 16: mod_base = um
  modified_base 17: mod_base = um
  modified_base 18: mod_base = OTHER; note = 2-O-methylribose adenine
  modified_base 19: mod_base = cm
  modified_base 20: mod_base = um
  modified_base 20..21: mod_base = OTHER; note = phosphorothioate
  modified_base 21: mod_base = OTHER; note = 2-O-methylribose adenine
  source 1..21: mol_type = other RNA
gggagattgttctcattacta

SEQ ID NO: 777 - RNA, 21 nt, synthetic construct
  misc_feature 1..21: note = Synthetic: WV-42541
  misc_feature 1..21: note = Synthetic: SSR-0106358
  modified_base 1: mod_base = OTHER; note = mono GalNAc C5-amino-C6-pyrrolidine linked by phosphate to mono GalNAc C5-amino-C6-pyrrolidine linked by phosphate the 5' end of 2-O-methylribose adenine
  modified_base 1..2: mod_base = OTHER; note = phosphorothioate
  modified_base 2: mod_base = OTHER; note = 2-O-methylribose adenine
  modified_base 3: mod_base = OTHER; note = 2-O-methylribose adenine
  modified_base 4: mod_base = gm
  modified_base 5: mod_base = OTHER; note = 2-O-methylribose adenine
  modified_base 6: mod_base = OTHER; note = 2-O-methylribose adenine
  modified_base 7: mod_base = OTHER; note = 2-fluororibose guanine
  modified_base 8: mod_base = um
  modified_base 9: mod_base = OTHER; note = 2-fluororibose guanine
  modified_base 10: mod_base = OTHER; note = 2-fluororibose guanine
  modified_base 11: mod_base = OTHER; note = 2-fluororibose guanine
  modified_base 12: mod_base = um
  modified_base 13: mod_base = gm
  modified_base 14: mod_base = OTHER; note = 2-O-methylribose adenine
  modified_base 15: mod_base = um
  modified_base 16: mod_base = gm
  modified_base 17: mod_base = um
  modified_base 18: mod_base = OTHER; note = 2-O-methylribose adenine
  modified_base 19: mod_base = OTHER; note = 2-O-methylribose adenine
  modified_base 20: mod_base = cm
  modified_base 20..21: mod_base = OTHER; note = phosphorothioate
  modified_base 21: mod_base = OTHER; note = 2-O-methylribose adenine
  source 1..21: mol_type = other RNA
aaagaagtgggtgatgtaaca

SEQ ID NO: 778 - RNA, 21 nt, synthetic construct
  misc_feature 1..21: note = Synthetic: WV-42542
  misc_feature 1..21: note = Synthetic: SSR-0106359
  modified_base 1: mod_base = OTHER; note = mono GalNAc C5-amino-C6-pyrrolidine linked by phosphate to mono GalNAc C5-amino-C6-pyrrolidine linked by phosphate the 5' end of 2-O-methylribose guanine
  modified_base 1..2: mod_base = OTHER; note = phosphorothioate
  modified_base 2: mod_base = um
  modified_base 3: mod_base = gm
  modified_base 4: mod_base = OTHER; note = 2-O-methylribose adenine
  modified_base 5: mod_base = um
  modified_base 6: mod_base = gm
  modified_base 7: mod_base = OTHER; note = 2-fluororibose uracil
  modified_base 8: mod_base = OTHER; note = 2-O-methylribose adenine
  modified_base 9: mod_base = OTHER; note = 2-fluororibose adenine
  modified_base 10: mod_base = OTHER; note = 2-fluororibose cytosine
  modified_base 11: mod_base = OTHER; note = 2-fluororibose adenine
  modified_base 12: mod_base = OTHER; note = 2-O-methylribose adenine
  modified_base 13: mod_base = um
  modified_base 14: mod_base = cm
  modified_base 15: mod_base = gm
  modified_base 16: mod_base = um
  modified_base 17: mod_base = gm
  modified_base 18: mod_base = gm
  modified_base 19: mod_base = um
  modified_base 20: mod_base = gm
  modified_base 20..21: mod_base = OTHER; note = phosphorothioate
  modified_base 21: mod_base = OTHER; note = 2-O-methylribose adenine
  source 1..21: mol_type = other RNA
gtgatgtaacaatcgtggtga

SEQ ID NO: 779 - RNA, 21 nt, synthetic construct
  misc_feature 1..21: note = Synthetic: WV-42543
  misc_feature 1..21: note = Synthetic: SSR-0106360
  modified_base 1: mod_base = OTHER; note = mono GalNAc C5-amino-C6-pyrrolidine linked by phosphate to mono GalNAc C5-amino-C6-pyrrolidine linked by phosphate the 5' end of 2-O-methylribose uracil
  modified_base 1..2: mod_base = OTHER; note = phosphorothioate
  modified_base 2: mod_base = gm
  modified_base 3: mod_base = um
  modified_base 4: mod_base = OTHER; note = 2-O-methylribose adenine
  modified_base 5: mod_base = OTHER; note = 2-O-methylribose adenine
  modified_base 6: mod_base = cm
  modified_base 7: mod_base = OTHER; note = 2-fluororibose adenine
  modified_base 8: mod_base = OTHER; note = 2-O-methylribose adenine
  modified_base 9: mod_base = OTHER; note = 2-fluororibose uracil
  modified_base 10: mod_base = OTHER; note = 2-fluororibose cytosine
  modified_base 11: mod_base = OTHER; note = 2-fluororibose guanine
  modified_base 12: mod_base = um
  modified_base 13: mod_base = gm
  modified_base 14: mod_base = gm
  modified_base 15: mod_base = um
  modified_base 16: mod_base = gm
  modified_base 17: mod_base = OTHER; note = 2-O-methylribose adenine
  modified_base 18: mod_base = OTHER; note = 2-O-methylribose adenine
  modified_base 19: mod_base = um
  modified_base 20: mod_base = OTHER; note = 2-O-methylribose adenine
  modified_base 20..21: mod_base = OTHER; note = phosphorothioate
  modified_base 21: mod_base = OTHER; note = 2-O-methylribose adenine
  source 1..21: mol_type = other RNA
tgtaacaatcgtggtgaataa

SEQ ID NO: 780 - RNA, 21 nt, synthetic construct
  misc_feature 1..21: note = Synthetic: WV-42544
  misc_feature 1..21: note = Synthetic: SSR-0106361
  modified_base 1: mod_base = OTHER; note = mono GalNAc C5-amino-C6-pyrrolidine linked by phosphate to mono GalNAc C5-amino-C6-pyrrolidine linked by phosphate the 5' end of 2-O-methylribose adenine
  modified_base 1..2: mod_base = OTHER; note = phosphorothioate
  modified_base 2: mod_base = cm
  modified_base 3: mod_base = OTHER; note = 2-O-methylribose adenine
  modified_base 4: mod_base = gm
  modified_base 5: mod_base = um
  modified_base 6: mod_base = OTHER; note = 2-O-methylribose adenine
  modified_base 7: mod_base = OTHER; note = 2-fluororibose uracil
  modified_base 8: mod_base = OTHER; note = 2-O-methylribose adenine
  modified_base 9: mod_base = OTHER; note = 2-fluororibose uracil
  modified_base 10: mod_base = OTHER; note = 2-fluororibose cytosine
  modified_base 11: mod_base = OTHER; note = 2-fluororibose cytosine
  modified_base 12: mod_base = OTHER; note = 2-O-methylribose adenine
  modified_base 13: mod_base = gm
  modified_base 14: mod_base = cm
  modified_base 15: mod_base = cm
  modified_base 16: mod_base = gm
  modified_base 17: mod_base = OTHER; note = 2-O-methylribose adenine
  modified_base 18: mod_base = um
  modified_base 19: mod_base = cm
  modified_base 20: mod_base = um
  modified_base 20..21: mod_base = OTHER; note = phosphorothioate
  modified_base 21: mod_base = OTHER; note = 2-O-methylribose adenine
  source 1..21: mol_type = other RNA
acagtatatccagccgatcta

SEQ ID NO: 781 - RNA, 21 nt, synthetic construct
  misc_feature 1..21: note = Synthetic: WV-42545
  misc_feature 1..21: note = Synthetic: SSR-0106362
  modified_base 1: mod_base = OTHER; note = mono GalNAc C5-amino-C6-pyrrolidine linked by phosphate to mono GalNAc C5-amino-C6-pyrrolidine linked by phosphate the 5' end of 2-O-methylribose cytosine
  modified_base 1..2: mod_base = OTHER; note = phosphorothioate
  modified_base 2: mod_base = OTHER; note = 2-O-methylribose adenine
  modified_base 3: mod_base = gm
  modified_base 4: mod_base = cm
  modified_base 5: mod_base = OTHER; note = 2-O-methylribose adenine
  modified_base 6: mod_base = cm
  modified_base 7: mod_base = OTHER; note = 2-fluororibose cytosine
  modified_base 8: mod_base = OTHER; note = 2-O-methylribose adenine
  modified_base 9: mod_base = OTHER; note = 2-fluororibose adenine
  modified_base 10: mod_base = OTHER; note = 2-fluororibose guanine
  modified_base 11: mod_base = OTHER; note = 2-fluororibose guanine
  modified_base 12: mod_base = OTHER; note = 2-O-methylribose adenine
  modified_base 13: mod_base = um
  modified_base 14: mod_base = gm
  modified_base 15: mod_base = OTHER; note = 2-O-methylribose adenine
  modified_base 16: mod_base = OTHER; note = 2-O-methylribose adenine
  modified_base 17: mod_base = gm
  modified_base 18: mod_base = OTHER; note = 2-O-methylribose adenine
  modified_base 19: mod_base = gm
  modified_base 20: mod_base = OTHER; note = 2-O-methylribose adenine
  modified_base 20..21: mod_base = OTHER; note = phosphorothioate
  modified_base 21: mod_base = OTHER; note = 2-O-methylribose adenine
  source 1..21: mol_type = other RNA
cagcaccaaggatgaagagaa

SEQ ID NO: 782 - RNA, 21 nt, synthetic construct
  misc_feature 1..21: note = Synthetic: WV-42546
  misc_feature 1..21: note = Synthetic: SSR-0106363
  modified_base 1: mod_base = OTHER; note = mono GalNAc C5-amino-C6-pyrrolidine linked by phosphate to mono GalNAc C5-amino-C6-pyrrolidine linked by phosphate the 5' end of 2-O-methylribose adenine
  modified_base 1..2: mod_base = OTHER; note = phosphorothioate
  modified_base 2: mod_base = gm
  modified_base 3: mod_base = cm
  modified_base 4: mod_base = OTHER; note = 2-O-methylribose adenine
  modified_base 5: mod_base = cm
  modified_base 6: mod_base = cm
  modified_base 7: mod_base = OTHER; note = 2-fluororibose adenine
  modified_base 8: mod_base = OTHER; note = 2-O-methylribose adenine
  modified_base 9: mod_base = OTHER; note = 2-fluororibose guanine
  modified_base 10: mod_base = OTHER; note = 2-fluororibose guanine
  modified_base 11: mod_base = OTHER; note = 2-fluororibose adenine
  modified_base 12: mod_base = um
  modified_base 13: mod_base = gm
  modified_base 14: mod_base = OTHER; note = 2-O-methylribose adenine
  modified_base 15: mod_base = OTHER; note = 2-O-methylribose adenine
  modified_base 16: mod_base = gm
  modified_base 17: mod_base = OTHER; note = 2-O-methylribose adenine
  modified_base 18: mod_base = gm
  modified_base 19: mod_base = OTHER; note = 2-O-methylribose adenine
  modified_base 20: mod_base = um
  modified_base 20..21: mod_base = OTHER; note = phosphorothioate
  modified_base 21: mod_base = OTHER; note = 2-O-methylribose adenine
  source 1..21: mol_type = other RNA
agcaccaaggatgaagagata

SEQ ID NO: 783 - RNA, 21 nt, synthetic construct
  misc_feature 1..21: note = Synthetic: WV-42547
  misc_feature 1..21: note = Synthetic: SSR-0106364
  modified_base 1: mod_base = OTHER; note = mono GalNAc C5-amino-C6-pyrrolidine linked by phosphate to mono GalNAc C5-amino-C6-pyrrolidine linked by phosphate the 5' end of 2-O-methylribose cytosine
  modified_base 1..2: mod_base = OTHER; note = phosphorothioate
  modified_base 2: mod_base = cm
  modified_base 3: mod_base = OTHER; note = 2-O-methylribose adenine
  modified_base 4: mod_base = OTHER; note = 2-O-methylribose adenine
  modified_base 5: mod_base = gm
  modified_base 6: mod_base = gm
  modified_base 7: mod_base = OTHER; note = 2-fluororibose adenine
  modified_base 8: mod_base = um
  modified_base 9: mod_base = OTHER; note = 2-fluororibose guanine
  modified_base 10: mod_base = OTHER; note = 2-fluororibose adenine
  modified_base 11: mod_base = OTHER; note = 2-fluororibose adenine
  modified_base 12: mod_base = gm
  modified_base 13: mod_base = OTHER; note = 2-O-methylribose adenine
  modified_base 14: mod_base = gm
  modified_base 15: mod_base = OTHER; note = 2-O-methylribose adenine
  modified_base 16: mod_base = um
  modified_base 17: mod_base = um
  modified_base 18: mod_base = OTHER; note = 2-O-methylribose adenine
  modified_base 19: mod_base = cm
  modified_base 20: mod_base = cm
  modified_base 20..21: mod_base = OTHER; note = phosphorothioate
  modified_base 21: mod_base = OTHER; note = 2-O-methylribose adenine
  source 1..21: mol_type = other RNA
ccaaggatgaagagattacca

SEQ ID NO: 784 - RNA, 21 nt, synthetic construct
  misc_feature 1..21: note = Synthetic: WV-42548
  misc_feature 1..21: note = Synthetic: SSR-0106365
  modified_base 1: mod_base = OTHER; note = mono GalNAc C5-amino-C6-pyrrolidine linked by phosphate to mono GalNAc C5-amino-C6-pyrrolidine linked by phosphate the 5' end of 2-O-methylribose guanine
  modified_base 1..2: mod_base = OTHER; note = phosphorothioate
  modified_base 2: mod_base = OTHER; note = 2-O-methylribose adenine
  modified_base 3: mod_base = cm
  modified_base 4: mod_base = OTHER; note = 2-O-methylribose adenine
  modified_base 5: mod_base = um
  modified_base 6: mod_base = um
  modified_base 7: mod_base = OTHER; note = 2-fluororibose uracil
  modified_base 8: mod_base = gm
  modified_base 9: mod_base = OTHER; note = 2-fluororibose adenine
  modified_base 10: mod_base = OTHER; note = 2-fluororibose guanine
  modified_base 11: mod_base = OTHER; note = 2-fluororibose guanine
  modified_base 12: mod_base = um
  modified_base 13: mod_base = cm
  modified_base 14: mod_base = OTHER; note = 2-O-methylribose adenine
  modified_base 15: mod_base = OTHER; note = 2-O-methylribose adenine
  modified_base 16: mod_base = cm
  modified_base 17: mod_base = OTHER; note = 2-O-methylribose adenine
  modified_base 18: mod_base = um
  modified_base 19: mod_base = cm
  modified_base 20: mod_base = cm
  modified_base 20..21: mod_base = OTHER; note = phosphorothioate
  modified_base 21: mod_base = OTHER; note = 2-O-methylribose adenine
  source 1..21: mol_type = other RNA
gacatttgaggtcaacatcca

SEQ ID NO: 785 - RNA, 21 nt, synthetic construct
  misc_feature 1..21: note = Synthetic: WV-42549
  misc_feature 1..21: note = Synthetic: SSR-0106366
  modified_base 1: mod_base = OTHER; note = mono GalNAc C5-amino-C6-pyrrolidine linked by phosphate to mono GalNAc C5-amino-C6-pyrrolidine linked by phosphate the 5' end of 2-O-methylribose uracil
  modified_base 1..2: mod_base = OTHER; note = phosphorothioate
  modified_base 2: mod_base = cm
  modified_base 3: mod_base = cm
  modified_base 4: mod_base = um
  modified_base 5: mod_base = OTHER; note = 2-O-methylribose adenine
  modified_base 6: mod_base = gm
  modified_base 7: mod_base = OTHER; note = 2-fluororibose guanine
  modified_base 8: mod_base = OTHER; note = 2-O-methylribose adenine
  modified_base 9: mod_base = OTHER; note = 2-fluororibose cytosine
  modified_base 10: mod_base = OTHER; note = 2-fluororibose adenine
  modified_base 11: mod_base = OTHER; note = 2-fluororibose uracil
  modified_base 12: mod_base = um
  modified_base 13: mod_base = um
  modified_base 14: mod_base = um
  modified_base 15: mod_base = um
  modified_base 16: mod_base = gm
  modified_base 17: mod_base = gm
  modified_base 18: mod_base = OTHER; note = 2-O-methylribose adenine
  modified_base 19: mod_base = um
  modified_base 20: mod_base = cm
  modified_base 20..21: mod_base = OTHER; note = phosphorothioate
  modified_base 21: mod_base = OTHER; note = 2-O-methylribose adenine
  source 1..21: mol_type = other RNA
tcctaggacatttttggatca

SEQ ID NO: 786 - RNA, 21 nt, synthetic construct
  misc_feature 1..21: note = Synthetic: WV-42550
  misc_feature 1..21: note = Synthetic: SSR-0106367
  modified_base 1: mod_base = OTHER; note = mono GalNAc C5-amino-C6-pyrrolidine linked by phosphate to mono GalNAc C5-amino-C6-pyrrolidine linked by phosphate the 5' end of 2-O-methylribose cytosine
  modified_base 1..2: mod_base = OTHER; note = phosphorothioate
  modified_base 2: mod_base = um
  modified_base 3: mod_base = OTHER; note = 2-O-methylribose adenine
  modified_base 4: mod_base = gm
  modified_base 5: mod_base = gm
  modified_base 6: mod_base = OTHER; note = 2-O-methylribose adenine
  modified_base 7: mod_base = OTHER; note = 2-fluororibose cytosine
  modified_base 8: mod_base = OTHER; note = 2-O-methylribose adenine
  modified_base 9: mod_base = OTHER; note = 2-fluororibose uracil
  modified_base 10: mod_base = OTHER; note = 2-fluororibose uracil
  modified_base 11: mod_base = OTHER; note = 2-fluororibose uracil
  modified_base 12: mod_base = um
  modified_base 13: mod_base = um
  modified_base 14: mod_base = gm
  modified_base 15: mod_base = gm
  modified_base 16: mod_base = OTHER; note = 2-O-methylribose adenine
  modified_base 17: mod_base = um
  modified_base 18: mod_base = cm
  modified_base 19: mod_base = OTHER; note = 2-O-methylribose adenine
  modified_base 20: mod_base = cm
  modified_base 20..21: mod_base = OTHER; note = phosphorothioate
  modified_base 21: mod_base = OTHER; note = 2-O-methylribose adenine
  source 1..21: mol_type = other RNA
ctaggacatttttggatcaca

SEQ ID NO: 787 - RNA, 21 nt, synthetic construct
  misc_feature 1..21: note = Synthetic: WV-42551
  misc_feature 1..21: note = Synthetic: SSR-0106368
  modified_base 1: mod_base = OTHER; note = mono GalNAc C5-amino-C6-pyrrolidine linked by phosphate to mono GalNAc C5-amino-C6-pyrrolidine linked by phosphate the 5' end of 2-O-methylribose uracil
  modified_base 1..2: mod_base = OTHER; note = phosphorothioate
  modified_base 2: mod_base = um
  modified_base 3: mod_base = gm
  modified_base 4: mod_base = gm
  modified_base 5: mod_base = OTHER; note = 2-O-methylribose adenine
  modified_base 6: mod_base = um
  modified_base 7: mod_base = OTHER; note = 2-fluororibose cytosine
  modified_base 8: mod_base = OTHER; note = 2-O-methylribose adenine
  modified_base 9: mod_base = OTHER; note = 2-fluororibose cytosine
  modified_base 10: mod_base = OTHER; note = 2-fluororibose adenine
  modified_base 11: mod_base = OTHER; note = 2-fluororibose adenine
  modified_base 12: mod_base = OTHER; note = 2-O-methylribose adenine
  modified_base 13: mod_base = OTHER; note = 2-O-methylribose adenine
  modified_base 14: mod_base = gm
  modified_base 15: mod_base = cm
  modified_base 16: mod_base = OTHER; note = 2-O-methylribose adenine
  modified_base 17: mod_base = cm
  modified_base 18: mod_base = um
  modified_base 19: mod_base = um
  modified_base 20: mod_base = cm
  modified_base 20..21: mod_base = OTHER; note = phosphorothioate
  modified_base 21: mod_base = OTHER; note = 2-O-methylribose adenine
  source 1..21: mol_type = other RNA
ttggatcacaaaagcacttca

SEQ ID NO: 788 - RNA, 21 nt, synthetic construct
  misc_feature 1..21: note = Synthetic: WV-42552
  misc_feature 1..21: note = Synthetic: SSR-0106369
  modified_base 1: mod_base = OTHER; note = mono GalNAc C5-amino-C6-pyrrolidine linked by phosphate to mono GalNAc C5-amino-C6-pyrrolidine linked by phosphate the 5' end of 2-O-methylribose uracil
  modified_base 1..2: mod_base = OTHER; note = phosphorothioate
  modified_base 2: mod_base = cm
  modified_base 3: mod_base = OTHER; note = 2-O-methylribose adenine
  modified_base 4: mod_base = cm
  modified_base 5: mod_base = OTHER; note = 2-O-methylribose adenine
  modified_base 6: mod_base = OTHER; note = 2-O-methylribose adenine
  modified_base 7: mod_base = OTHER; note = 2-fluororibose adenine
  modified_base 8: mod_base = OTHER; note = 2-O-methylribose adenine
  modified_base 9: mod_base = OTHER; note = 2-fluororibose guanine
  modified_base 10: mod_base = OTHER; note = 2-fluororibose cytosine
  modified_base 11: mod_base = OTHER; note = 2-fluororibose adenine
  modified_base 12: mod_base = cm
  modified_base 13: mod_base = um
  modified_base 14: mod_base = um
  modified_base 15: mod_base = cm
  modified_base 16: mod_base = um
  modified_base 17: mod_base = um
  modified_base 18: mod_base = cm
  modified_base 19: mod_base = cm
  modified_base 20: mod_base = OTHER; note = 2-O-methylribose adenine
  modified_base 20..21: mod_base = OTHER; note = phosphorothioate
  modified_base 21: mod_base = OTHER; note = 2-O-methylribose adenine
  source 1..21: mol_type = other RNA
tcacaaaagcacttcttccaa

SEQ ID NO: 789 - RNA, 21 nt, synthetic construct
  misc_feature 1..21: note = Synthetic: WV-42553
  misc_feature 1..21: note = Synthetic: SSR-0106370
  modified_base 1: mod_base = OTHER; note = mono GalNAc C5-amino-C6-pyrrolidine linked by phosphate to mono GalNAc C5-amino-C6-pyrrolidine linked by phosphate the 5' end of 2-O-methylribose adenine
  modified_base 1..2: mod_base = OTHER; note = phosphorothioate
  modified_base 2: mod_base = um
  modified_base 3: mod_base = cm
  modified_base 4: mod_base = cm
  modified_base 5: mod_base = cm
  modified_base 6: mod_base = OTHER; note = 2-O-methylribose adenine
  modified_base 7: mod_base = OTHER; note = 2-fluororibose uracil
  modified_base 8: mod_base = OTHER; note = 2-O-methylribose adenine
  modified_base 9: mod_base = OTHER; note = 2-fluororibose uracil
  modified_base 10: mod_base = OTHER; note = 2-fluororibose uracil
  modified_base 11: mod_base = OTHER; note = 2-fluororibose guanine
  modified_base 12: mod_base = um
  modified_base 13: mod_base = um
  modified_base 14: mod_base = cm
  modified_base 15: mod_base = cm
  modified_base 16: mod_base = OTHER; note = 2-O-methylribose adenine
  modified_base 17: mod_base = gm
  modified_base 18: mod_base = cm
  modified_base 19: mod_base = OTHER; note = 2-O-methylribose adenine
  modified_base 20: mod_base = OTHER; note = 2-O-methylribose adenine
  modified_base 20..21: mod_base = OTHER; note = phosphorothioate
  modified_base 21: mod_base = OTHER; note = 2-O-methylribose adenine
  source 1..21: mol_type = other RNA
atcccatattgttccagcaaa

SEQ ID NO: 790 - RNA, 21 nt, synthetic construct
  misc_feature 1..21: note = Synthetic: WV-42554
  misc_feature 1..21: note = Synthetic: SSR-0106371
  modified_base 1: mod_base = OTHER; note = mono GalNAc C5-amino-C6-pyrrolidine linked by phosphate to mono GalNAc C5-amino-C6-pyrrolidine linked by phosphate the 5' end of 2-O-methylribose guanine
  modified_base 1..2: mod_base = OTHER; note = phosphorothioate
  modified_base 2: mod_base = cm
  modified_base 3: mod_base = cm
  modified_base 4: mod_base = gm
  modified_base 5: mod_base = cm
  modified_base 6: mod_base = um
  modified_base 7: mod_base = OTHER; note = 2-fluororibose guanine
  modified_base 8: mod_base = um
  modified_base 9: mod_base = OTHER; note = 2-fluororibose uracil
  modified_base 10: mod_base = OTHER; note = 2-fluororibose guanine
  modified_base 11: mod_base = OTHER; note = 2-fluororibose guanine
  modified_base 12: mod_base = cm
  modified_base 13: mod_base = um
  modified_base 14: mod_base = um
  modified_base 15: mod_base = um
  modified_base 16: mod_base = cm
  modified_base 17: mod_base = OTHER; note = 2-O-methylribose adenine
  modified_base 18: mod_base = cm
  modified_base 19: mod_base = OTHER; note = 2-O-methylribose adenine
  modified_base 20: mod_base = gm
  modified_base 20..21: mod_base = OTHER; note = phosphorothioate
  modified_base 21: mod_base = OTHER; note = 2-O-methylribose adenine
  source 1..21: mol_type = other RNA
gccgctgttggctttcacaga

SEQ ID NO: 791 - RNA, 21 nt, synthetic construct
  misc_feature 1..21: note = Synthetic: WV-42555
  misc_feature 1..21: note = Synthetic: SSR-0106372
  modified_base 1: mod_base = OTHER; note = mono GalNAc C5-amino-C6-pyrrolidine linked by phosphate to mono GalNAc C5-amino-C6-pyrrolidine linked by phosphate the 5' end of 2-O-methylribose uracil
  modified_base 1..2: mod_base = OTHER; note = phosphorothioate
  modified_base 2: mod_base = um
  modified_base 3: mod_base = gm
  modified_base 4: mod_base = gm
  modified_base 5: mod_base = cm
  modified_base 6: mod_base = um
  modified_base 7: mod_base = OTHER; note = 2-fluororibose uracil
  modified_base 8: mod_base = um
  modified_base 9: mod_base = OTHER; note = 2-fluororibose cytosine
  modified_base 10: mod_base = OTHER; note = 2-fluororibose adenine
  modified_base 11: mod_base = OTHER; note = 2-fluororibose cytosine
  modified_base 12: mod_base = OTHER; note = 2-O-methylribose adenine
  modified_base 13: mod_base = gm
  modified_base 14: mod_base = OTHER; note = 2-O-methylribose adenine
  modified_base 15: mod_base = gm
  modified_base 16: mod_base = gm
  modified_base 17: mod_base = um
  modified_base 18: mod_base = cm
  modified_base 19: mod_base = um
  modified_base 20: mod_base = gm
  modified_base 20..21: mod_base = OTHER; note = phosphorothioate
  modified_base 21: mod_base = OTHER; note = 2-O-methylribose adenine
  source 1..21: mol_type = other RNA
ttggctttcacagaggtctga

SEQ ID NO: 792 - RNA, 21 nt, synthetic construct
  misc_feature 1..21: note = Synthetic: WV-42556
  misc_feature 1..21: note = Synthetic: SSR-0106373
  modified_base 1: mod_base = OTHER; note = mono GalNAc C5-amino-C6-pyrrolidine linked by phosphate to mono GalNAc C5-amino-C6-pyrrolidine linked by phosphate the 5' end of 2-O-methylribose guanine
  modified_base 1..2: mod_base = OTHER; note = phosphorothioate
  modified_base 2: mod_base = gm
  modified_base 3: mod_base = cm
  modified_base 4: mod_base = um
  modified_base 5: mod_base = um
  modified_base 6: mod_base = um
  modified_base 7: mod_base = OTHER; note = 2-fluororibose cytosine
  modified_base 8: mod_base = OTHER; note = 2-O-methylribose adenine
  modified_base 9: mod_base = OTHER; note = 2-fluororibose cytosine
  modified_base 10: mod_base = OTHER; note = 2-fluororibose adenine
  modified_base 11: mod_base = OTHER; note = 2-fluororibose guanine
  modified_base 12: mod_base = OTHER; note = 2-O-methylribose adenine
  modified_base 13: mod_base = gm
  modified_base 14: mod_base = gm
  modified_base 15: mod_base = um
  modified_base 16: mod_base = cm
  modified_base 17: mod_base = um
  modified_base 18: mod_base = gm
  modified_base 19: mod_base = OTHER; note = 2-O-methylribose adenine
  modified_base 20: mod_base = cm
  modified_base 20..21: mod_base = OTHER; note = phosphorothioate
  modified_base 21: mod_base = OTHER; note = 2-O-methylribose adenine
  source 1..21: mol_type = other RNA
ggctttcacagaggtctgaca

SEQ ID NO: 793 - RNA, 21 nt, synthetic construct
  misc_feature 1..21: note = Synthetic: WV-42557
  misc_feature 1..21: note = Synthetic: SSR-0106374
  modified_base 1: mod_base = OTHER; note = mono GalNAc C5-amino-C6-pyrrolidine linked by phosphate to mono GalNAc C5-amino-C6-pyrrolidine linked by phosphate the 5' end of 2-O-methylribose adenine
  modified_base 1..2: mod_base = OTHER; note = phosphorothioate
  modified_base 2: mod_base = gm
  modified_base 3: mod_base = gm
  modified_base 4: mod_base = um
  modified_base 5: mod_base = cm
  modified_base 6: mod_base = um
  modified_base 7: mod_base = OTHER; note = 2-fluororibose guanine
  modified_base 8: mod_base = OTHER; note = 2-O-methylribose adenine
  modified_base 9: mod_base = OTHER; note = 2-fluororibose cytosine
  modified_base 10: mod_base = OTHER; note = 2-fluororibose adenine
  modified_base 11: mod_base = OTHER; note = 2-fluororibose uracil
  modified_base 12: mod_base = cm
  modified_base 13: mod_base = OTHER; note = 2-O-methylribose adenine
  modified_base 14: mod_base = gm
  modified_base 15: mod_base = OTHER; note = 2-O-methylribose adenine
  modified_base 16: mod_base = OTHER; note = 2-O-methylribose adenine
  modified_base 17: mod_base = cm
  modified_base 18: mod_base = um
  modified_base 19: mod_base = um
  modified_base 20: mod_base = cm
  modified_base 20..21: mod_base = OTHER; note = phosphorothioate
  modified_base 21: mod_base = OTHER; note = 2-O-methylribose adenine
  source 1..21: mol_type = other RNA
aggtctgacatcagaacttca

SEQ ID NO: 794 - RNA, 21 nt, synthetic construct
  misc_feature 1..21: note = Synthetic: WV-42558
  misc_feature 1..21: note = Synthetic: SSR-0106375
  modified_base 1: mod_base = OTHER; note = mono GalNAc C5-amino-C6-pyrrolidine linked by phosphate to mono GalNAc C5-amino-C6-pyrrolidine linked by phosphate the 5' end of 2-O-methylribose uracil
  modified_base 1..2: mod_base = OTHER; note = phosphorothioate
  modified_base 2: mod_base = um
  modified_base 3: mod_base = gm
  modified_base 4: mod_base = gm
  modified_base 5: mod_base = gm
  modified_base 6: mod_base = OTHER; note = 2-O-methylribose adenine
  modified_base 7: mod_base = OTHER; note = 2-fluororibose adenine
  modified_base 8: mod_base = OTHER; note = 2-O-methylribose adenine
  modified_base 9: mod_base = OTHER; note = 2-fluororibose adenine
  modified_base 10: mod_base = OTHER; note = 2-fluororibose adenine
  modified_base 11: mod_base = OTHER; note = 2-fluororibose cytosine
  modified_base 12: mod_base = um
  modified_base 13: mod_base = gm
  modified_base 14: mod_base = gm
  modified_base 15: mod_base = um
  modified_base 16: mod_base = OTHER; note = 2-O-methylribose adenine
  modified_base 17: mod_base = um
  modified_base 18: mod_base = cm
  modified_base 19: mod_base = OTHER; note = 2-O-methylribose adenine
  modified_base 20: mod_base = OTHER; note = 2-O-methylribose adenine
  modified_base 20..21: mod_base = OTHER; note = phosphorothioate
  modified_base 21: mod_base = OTHER; note = 2-O-methylribose adenine
  source 1..21: mol_type = other RNA
ttgggaaaaactggtatcaaa

SEQ ID NO: 795 - RNA, 21 nt, synthetic construct
  misc_feature 1..21: note = Synthetic: WV-42559
  misc_feature 1..21: note = Synthetic: SSR-0106376
  modified_base 1: mod_base = OTHER; note = mono GalNAc C5-amino-C6-pyrrolidine linked by phosphate to mono GalNAc C5-amino-C6-pyrrolidine linked by phosphate the 5' end of 2-O-methylribose uracil
  modified_base 1..2: mod_base = OTHER; note = phosphorothioate
  modified_base 2: mod_base = gm
  modified_base 3: mod_base = gm
  modified_base 4: mod_base = gm
  modified_base 5: mod_base = OTHER; note = 2-O-methylribose adenine
  modified_base 6: mod_base = OTHER; note = 2-O-methylribose adenine
  modified_base 7: mod_base = OTHER; note = 2-fluororibose adenine
  modified_base 8: mod_base = OTHER; note = 2-O-methylribose adenine
  modified_base 9: mod_base = OTHER; note = 2-fluororibose adenine
  modified_base 10: mod_base = OTHER; note = 2-fluororibose cytosine
  modified_base 11: mod_base = OTHER; note = 2-fluororibose uracil
  modified_base 12: mod_base = gm
  modified_base 13: mod_base = gm
  modified_base 14: mod_base = um
  modified_base 15: mod_base = OTHER; note = 2-O-methylribose adenine
  modified_base 16: mod_base = um
  modified_base 17: mod_base = cm
  modified_base 18: mod_base = OTHER; note = 2-O-methylribose adenine
  modified_base 19: mod_base = OTHER; note = 2-O-methylribose adenine
  modified_base 20: mod_base = OTHER; note = 2-O-methylribose adenine
  modified_base 20..21: mod_base = OTHER; note = phosphorothioate
  modified_base 21: mod_base = OTHER; note = 2-O-methylribose adenine
  source 1..21: mol_type = other RNA
tgggaaaaactggtatcaaaa

SEQ ID NO: 796 - RNA, 21 nt, synthetic construct
  misc_feature 1..21: note = Synthetic: WV-42560
  misc_feature 1..21: note = Synthetic: SSR-0106377
  modified_base 1: mod_base = OTHER; note = mono GalNAc C5-amino-C6-pyrrolidine linked by phosphate to mono GalNAc C5-amino-C6-pyrrolidine linked by phosphate the 5' end of 2-O-methylribose uracil
  modified_base 1..2: mod_base = OTHER; note = phosphorothioate
  modified_base 2: mod_base = gm
  modified_base 3: mod_base = gm
  modified_base 4: mod_base = um
  modified_base 5: mod_base = OTHER; note = 2-O-methylribose adenine
  modified_base 6: mod_base = um
  modified_base 7: mod_base = OTHER; note = 2-fluororibose cytosine
  modified_base 8: mod_base = OTHER; note = 2-O-methylribose adenine
  modified_base 9: mod_base = OTHER; note = 2-fluororibose adenine
  modified_base 10: mod_base = OTHER; note = 2-fluororibose adenine
  modified_base 11: mod_base = OTHER; note = 2-fluororibose adenine
  modified_base 12: mod_base = cm
  modified_base 13: mod_base = cm
  modified_base 14: mod_base = um
  modified_base 15: mod_base = cm
  modified_base 16: mod_base = OTHER; note = 2-O-methylribose adenine
  modified_base 17: mod_base = um
  modified_base 18: mod_base = gm
  modified_base 19: mod_base = um
  modified_base 20: mod_base = cm
  modified_base 20..21: mod_base = OTHER; note = phosphorothioate
  modified_base 21: mod_base = OTHER; note = 2-O-methylribose adenine
  source 1..21: mol_type = other RNA
tggtatcaaaacctcatgtca

SEQ ID NO: 797 - RNA, 21 nt, synthetic construct
  misc_feature 1..21: note = Synthetic: WV-42561
  misc_feature 1..21: note = Synthetic: SSR-0106378
  modified_base 1: mod_base = OTHER; note = mono GalNAc C5-amino-C6-pyrrolidine linked by phosphate to mono GalNAc C5-amino-C6-pyrrolidine linked by phosphate the 5' end of 2-O-methylribose adenine
  modified_base 1..2: mod_base = OTHER; note = phosphorothioate
  modified_base 2: mod_base = gm
  modified_base 3: mod_base = cm
  modified_base 4: mod_base = OTHER; note = 2-O-methylribose adenine
  modified_base 5: mod_base = cm
  modified_base 6: mod_base = OTHER; note = 2-O-methylribose adenine
  modified_base 7: mod_base = OTHER; note = 2-fluororibose adenine
  modified_base 8: mod_base = gm
  modified_base 9: mod_base = OTHER; note = 2-fluororibose adenine
  modified_base 10: mod_base = OTHER; note = 2-fluororibose uracil
  modified_base 11: mod_base = OTHER; note = 2-fluororibose uracil
  modified_base 12: mod_base = OTHER; note = 2-O-methylribose adenine
  modified_base 13: mod_base = um
  modified_base 14: mod_base = gm
  modified_base 15: mod_base = gm
  modified_base 16: mod_base = cm
  modified_base 17: mod_base = cm
  modified_base 18: mod_base = um
  modified_base 19: mod_base = gm
  modified_base 20: mod_base = um
  modified_base 20..21: mod_base = OTHER; note = phosphorothioate
  modified_base 21: mod_base = OTHER; note = 2-O-methylribose adenine
  source 1..21: mol_type = other RNA
agcacaagattatggcctgta

SEQ ID NO: 798 - RNA, 21 nt, synthetic construct
  misc_feature 1..21: note = Synthetic: WV-42562
  misc_feature 1..21: note = Synthetic: SSR-0106379
  modified_base 1: mod_base = OTHER; note = mono GalNAc C5-amino-C6-pyrrolidine linked by phosphate to mono GalNAc C5-amino-C6-pyrrolidine linked by phosphate the 5' end of 2-O-methylribose guanine
  modified_base 1..2: mod_base = OTHER; note = phosphorothioate
  modified_base 2: mod_base = cm
  modified_base 3: mod_base = OTHER; note = 2-O-methylribose adenine
  modified_base 4: mod_base = cm
  modified_base 5: mod_base = OTHER; note = 2-O-methylribose adenine
  modified_base 6: mod_base = OTHER; note = 2-O-methylribose adenine
  modified_base 7: mod_base = OTHER; note = 2-fluororibose guanine
  modified_base 8: mod_base = OTHER; note = 2-O-methylribose adenine
  modified_base 9: mod_base = OTHER; note = 2-fluororibose uracil
  modified_base 10: mod_base = OTHER; note = 2-fluororibose uracil
  modified_base 11: mod_base = OTHER; note = 2-fluororibose adenine
  modified_base 12: mod_base = um
  modified_base 13: mod_base = gm
  modified_base 14: mod_base = gm
  modified_base 15: mod_base = cm
  modified_base 16: mod_base = cm
  modified_base 17: mod_base = um
  modified_base 18: mod_base = gm
  modified_base 19: mod_base = um
  modified_base 20: mod_base = OTHER; note = 2-O-methylribose adenine
  modified_base 20..21: mod_base = OTHER; note = phosphorothioate
  modified_base 21: mod_base = OTHER; note = 2-O-methylribose adenine
  source 1..21: mol_type = other RNA
gcacaagattatggcctgtaa

SEQ ID NO: 799 - RNA, 21 nt, synthetic construct
  misc_feature 1..21: note = Synthetic: WV-42563
  misc_feature 1..21: note = Synthetic: SSR-0106380
  modified_base 1: mod_base = OTHER; note = mono GalNAc C5-amino-C6-pyrrolidine linked by phosphate to mono GalNAc C5-amino-C6-pyrrolidine linked by phosphate the 5' end of 2-O-methylribose adenine
  modified_base 1..2: mod_base = OTHER; note = phosphorothioate
  modified_base 2: mod_base = OTHER; note = 2-O-methylribose adenine
  modified_base 3: mod_base = gm
  modified_base 4: mod_base = OTHER; note = 2-O-methylribose adenine
  modified_base 5: mod_base = um
  modified_base 6: mod_base = um
  modified_base 7: mod_base = OTHER; note = 2-fluororibose adenine
  modified_base 8: mod_base = um
  modified_base 9: mod_base = OTHER; note = 2-fluororibose guanine
  modified_base 10: mod_base = OTHER; note = 2-fluororibose guanine
  modified_base 11: mod_base = OTHER; note = 2-fluororibose cytosine
  modified_base 12: mod_base = cm
  modified_base 13: mod_base = um
  modified_base 14: mod_base = gm
  modified_base 15: mod_base = um
  modified_base 16: mod_base = OTHER; note = 2-O-methylribose adenine
  modified_base 17: mod_base = um
  modified_base 18: mod_base = um
  modified_base 19: mod_base = gm
  modified_base 20: mod_base = gm
  modified_base 20..21: mod_base = OTHER; note = phosphorothioate
  modified_base 21: mod_base = OTHER; note = 2-O-methylribose adenine
  source 1..21: mol_type = other RNA
aagattatggcctgtattgga

SEQ ID NO: 800 - RNA, 21 nt, synthetic construct
  misc_feature 1..21: note = Synthetic: WV-42564
  misc_feature 1..21: note = Synthetic: SSR-0106381
  modified_base 1: mod_base = OTHER; note = mono GalNAc C5-amino-C6-pyrrolidine linked by phosphate to mono GalNAc C5-amino-C6-pyrrolidine linked by phosphate the 5' end of 2-O-methylribose adenine
  modified_base 1..2: mod_base = OTHER; note = phosphorothioate
  modified_base 2: mod_base = cm
  modified_base 3: mod_base = OTHER; note = 2-O-methylribose adenine
  modified_base 4: mod_base = gm
  modified_base 5: mod_base = OTHER; note = 2-O-methylribose adenine
  modified_base 6: mod_base = um
  modified_base 7: mod_base = OTHER; note = 2-fluororibose guanine
  modified_base 8: mod_base = OTHER; note = 2-O-methylribose adenine
  modified_base 9: mod_base = OTHER; note = 2-fluororibose adenine
  modified_base 10: mod_base = OTHER; note = 2-fluororibose guanine
  modified_base 11: mod_base = OTHER; note = 2-fluororibose uracil
  modified_base 12: mod_base = cm
  modified_base 13: mod_base = gm
  modified_base 14: mod_base = um
  modified_base 15: mod_base = OTHER; note = 2-O-methylribose adenine
  modified_base 16: mod_base = OTHER; note = 2-O-methylribose adenine
  modified_base 17: mod_base = gm
  modified_base 18: mod_base = OTHER; note = 2-O-methylribose adenine
  modified_base 19: mod_base = OTHER; note = 2-O-methylribose adenine
  modified_base 20: mod_base = gm
  modified_base 20..21: mod_base = OTHER; note = phosphorothioate
  modified_base 21: mod_base = OTHER; note = 2-O-methylribose adenine
  source 1..21: mol_type = other RNA
acagatgaagtcgtaagaaga

SEQ ID NO: 801 - RNA, 21 nt, synthetic construct
  misc_feature 1..21: note = Synthetic: WV-42565
  misc_feature 1..21: note = Synthetic: SSR-0106382
  modified_base 1: mod_base = OTHER; note = mono GalNAc C5-amino-C6-pyrrolidine linked by phosphate to mono GalNAc C5-amino-C6-pyrrolidine linked by phosphate the 5' end of 2-O-methylribose uracil
  modified_base 1..2: mod_base = OTHER; note = phosphorothioate
  modified_base 2: mod_base = OTHER; note = 2-O-methylribose adenine
  modified_base 3: mod_base = OTHER; note = 2-O-methylribose adenine
  modified_base 4: mod_base = gm
  modified_base 5: mod_base = OTHER; note = 2-O-methylribose adenine
  modified_base 6: mod_base = OTHER; note = 2-O-methylribose adenine
  modified_base 7: mod_base = OTHER; note = 2-fluororibose guanine
  modified_base 8: mod_base = um
  modified_base 9: mod_base = OTHER; note = 2-fluororibose cytosine
  modified_base 10: mod_base = OTHER; note = 2-fluororibose uracil
  modified_base 11: mod_base = OTHER; note = 2-fluororibose guanine
  modified_base 12: mod_base = OTHER; note = 2-O-methylribose adenine
  modified_base 13: mod_base = um
  modified_base 14: mod_base = OTHER; note = 2-O-methylribose adenine
  modified_base 15: mod_base = gm
  modified_base 16: mod_base = OTHER; note = 2-O-methylribose adenine
  modified_base 17: mod_base = um
  modified_base 18: mod_base = gm
  modified_base 19: mod_base = gm
  modified_base 20: mod_base = OTHER; note = 2-O-methylribose adenine
  modified_base 20..21: mod_base = OTHER; note = phosphorothioate
  modified_base 21: mod_base = OTHER; note = 2-O-methylribose adenine
  source 1..21: mol_type = other RNA
taagaagtctgatagatggaa

SEQ ID NO: 802 - RNA, 21 nt, synthetic construct
  misc_feature 1..21: note = Synthetic: WV-42566
  misc_feature 1..21: note = Synthetic: SSR-0106383
  modified_base 1: mod_base = OTHER; note = mono GalNAc C5-amino-C6-pyrrolidine linked by phosphate to mono GalNAc C5-amino-C6-pyrrolidine linked by phosphate the 5' end of 2-O-methylribose adenine
  modified_base 1..2: mod_base = OTHER; note = phosphorothioate
  modified_base 2: mod_base = gm
  modified_base 3: mod_base = um
  modified_base 4: mod_base = cm
  modified_base 5: mod_base = um
  modified_base 6: mod_base = gm
  modified_base 7: mod_base = OTHER; note = 2-fluororibose adenine
  modified_base 8: mod_base = um
  modified_base 9: mod_base = OTHER; note = 2-fluororibose adenine
  modified_base 10: mod_base = OTHER; note = 2-fluororibose guanine
  modified_base 11: mod_base = OTHER; note = 2-fluororibose adenine
  modified_base 12: mod_base = um
  modified_base 13: mod_base = gm
  modified_base 14: mod_base = gm
  modified_base 15: mod_base = OTHER; note = 2-O-methylribose adenine
  modified_base 16: mod_base = OTHER; note = 2-O-methylribose adenine
  modified_base 17: mod_base = um
  modified_base 18: mod_base = OTHER; note = 2-O-methylribose adenine
  modified_base 19: mod_base = cm
  modified_base 20: mod_base = um
  modified_base 20..21: mod_base = OTHER; note = phosphorothioate
  modified_base 21: mod_base = OTHER; note = 2-O-methylribose adenine
  source 1..21: mol_type = other RNA
agtctgatagatggaatacta

SEQ ID NO: 803 - RNA, 21 nt, synthetic construct
  misc_feature 1..21: note = Synthetic: WV-42567
  misc_feature 1..21: note = Synthetic: SSR-0106384
  modified_base 1: mod_base = OTHER; note = mono GalNAc C5-amino-C6-pyrrolidine linked by phosphate to mono GalNAc C5-amino-C6-pyrrolidine linked by phosphate the 5' end of 2-O-methylribose guanine
  modified_base 1..2: mod_base = OTHER; note = phosphorothioate
  modified_base 2: mod_base = um
  modified_base 3: mod_base = cm
  modified_base 4: mod_base = um
  modified_base 5: mod_base = gm
  modified_base 6: mod_base = OTHER; note = 2-O-methylribose adenine
  modified_base 7: mod_base = OTHER; note = 2-fluororibose uracil
  modified_base 8: mod_base = OTHER; note = 2-O-methylribose adenine
  modified_base 9: mod_base = OTHER; note = 2-fluororibose guanine
  modified_base 10: mod_base = OTHER; note = 2-fluororibose adenine
  modified_base 11: mod_base = OTHER; note = 2-fluororibose uracil
  modified_base 12: mod_base = gm
  modified_base 13: mod_base = gm
  modified_base 14: mod_base = OTHER; note = 2-O-methylribose adenine
  modified_base 15: mod_base = OTHER; note = 2-O-methylribose adenine
  modified_base 16: mod_base = um
  modified_base 17: mod_base = OTHER; note = 2-O-methylribose adenine
  modified_base 18: mod_base = cm
  modified_base 19: mod_base = um
  modified_base 20: mod_base = um
  modified_base 20..21: mod_base = OTHER; note = phosphorothioate
  modified_base 21: mod_base = OTHER; note = 2-O-methylribose adenine
  source 1..21: mol_type = other RNA
gtctgatagatggaatactta

SEQ ID NO: 804 - RNA, 21 nt, synthetic construct
  misc_feature 1..21: note = Synthetic: WV-42568
  misc_feature 1..21: note = Synthetic: SSR-0106385
  modified_base 1: mod_base = OTHER; note = mono GalNAc C5-amino-C6-pyrrolidine linked by phosphate to mono GalNAc C5-amino-C6-pyrrolidine linked by phosphate the 5' end of 2-O-methylribose uracil
  modified_base 1..2: mod_base = OTHER; note = phosphorothioate
  modified_base 2: mod_base = OTHER; note = 2-O-methylribose adenine
  modified_base 3: mod_base = gm
  modified_base 4: mod_base = OTHER; note = 2-O-methylribose adenine
  modified_base 5: mod_base = um
  modified_base 6: mod_base = gm
  modified_base 7: mod_base = OTHER; note = 2-fluororibose guanine
  modified_base 8: mod_base = OTHER; note = 2-O-methylribose adenine
  modified_base 9: mod_base = OTHER; note = 2-fluororibose adenine
  modified_base 10: mod_base = OTHER; note = 2-fluororibose uracil
  modified_base 11: mod_base = OTHER; note = 2-fluororibose adenine
  modified_base 12: mod_base = cm
  modified_base 13: mod_base = um
  modified_base 14: mod_base = um
  modified_base 15: mod_base = OTHER; note = 2-O-methylribose adenine
  modified_base 16: mod_base = cm
  modified_base 17: mod_base = cm
  modified_base 18: mod_base = OTHER; note = 2-O-methylribose adenine
  modified_base 19: mod_base = OTHER; note = 2-O-methylribose adenine
  modified_base 20: mod_base = um
  modified_base 20..21: mod_base = OTHER; note = phosphorothioate
  modified_base 21: mod_base = OTHER; note = 2-O-methylribose adenine
  source 1..21: mol_type = other RNA
tagatggaatacttaccaata

SEQ ID NO: 805 - RNA, 21 nt, synthetic construct
  misc_feature 1..21: note = Synthetic: WV-42569
  misc_feature 1..21: note = Synthetic: SSR-0106386
  modified_base 1: mod_base = OTHER; note = mono GalNAc C5-amino-C6-pyrrolidine linked by phosphate to mono GalNAc C5-amino-C6-pyrrolidine linked by phosphate the 5' end of 2-O-methylribose adenine
  modified_base 1..2: mod_base = OTHER; note = phosphorothioate
  modified_base 2: mod_base = gm
  modified_base 3: mod_base = OTHER; note = 2-O-methylribose adenine
  modified_base 4: mod_base = um
  modified_base 5: mod_base = gm
  modified_base 6: mod_base = gm
  modified_base 7: mod_base = OTHER; note = 2-fluororibose adenine
  modified_base 8: mod_base = OTHER; note = 2-O-methylribose adenine
  modified_base 9: mod_base = OTHER; note = 2-fluororibose uracil
  modified_base 10: mod_base = OTHER; note = 2-fluororibose adenine
  modified_base 11: mod_base = OTHER; note = 2-fluororibose cytosine
  modified_base 12: mod_base = um
  modified_base 13: mod_base = um
  modified_base 14: mod_base = OTHER; note = 2-O-methylribose adenine
  modified_base 15: mod_base = cm
  modified_base 16: mod_base = cm
  modified_base 17: mod_base = OTHER; note = 2-O-methylribose adenine
  modified_base 18: mod_base = OTHER; note = 2-O-methylribose adenine
  modified_base 19: mod_base = um
  modified_base 20: mod_base = OTHER; note = 2-O-methylribose adenine
  modified_base 20..21: mod_base = OTHER; note = phosphorothioate
  modified_base 21: mod_base = OTHER; note = 2-O-methylribose adenine
  source 1..21: mol_type = other RNA
agatggaatacttaccaataa

SEQ ID NO: 806 - RNA, 21 nt, synthetic construct
  misc_feature 1..21: note = Synthetic: WV-42570
  misc_feature 1..21: note = Synthetic: SSR-0106387
  modified_base 1: mod_base = OTHER; note = mono GalNAc C5-amino-C6-pyrrolidine linked by phosphate to mono GalNAc C5-amino-C6-pyrrolidine linked by phosphate the 5' end of 2-O-methylribose adenine
  modified_base 1..2: mod_base = OTHER; note = phosphorothioate
  modified_base 2: mod_base = um
  modified_base 3: mod_base = gm
  modified_base 4: mod_base = gm
  modified_base 5: mod_base = OTHER; note = 2-O-methylribose adenine
  modified_base 6: mod_base = OTHER; note = 2-O-methylribose adenine
  modified_base 7: mod_base = OTHER; note = 2-fluororibose uracil
  modified_base 8: mod_base = OTHER; note = 2-O-methylribose adenine
  modified_base 9: mod_base = OTHER; note = 2-fluororibose cytosine
  modified_base 10: mod_base = OTHER; note = 2-fluororibose uracil
  modified_base 11: mod_base = OTHER; note = 2-fluororibose uracil
  modified_base 12: mod_base = OTHER; note = 2-O-methylribose adenine
  modified_base 13: mod_base = cm
  modified_base 14: mod_base = cm
  modified_base 15: mod_base = OTHER; note = 2-O-methylribose adenine
  modified_base 16: mod_base = OTHER; note = 2-O-methylribose adenine
  modified_base 17: mod_base = um
  modified_base 18: mod_base = OTHER; note = 2-O-methylribose adenine
  modified_base 19: mod_base = OTHER; note = 2-O-methylribose adenine
  modified_base 20: mod_base = gm
  modified_base 20..21: mod_base = OTHER; note = phosphorothioate
  modified_base 21: mod_base = OTHER; note = 2-O-methylribose adenine
  source 1..21: mol_type = other RNA
atggaatacttaccaataaga

SEQ ID NO: 807 - RNA, 21 nt, synthetic construct
  misc_feature 1..21: note = Synthetic: WV-42571
  misc_feature 1..21: note = Synthetic: SSR-0106388
  modified_base 1: mod_base = OTHER; note = mono GalNAc C5-amino-C6-pyrrolidine linked by phosphate to mono GalNAc C5-amino-C6-pyrrolidine linked by phosphate the 5' end of 2-O-methylribose uracil
  modified_base 1..2: mod_base = OTHER; note = phosphorothioate
  modified_base 2: mod_base = gm
  modified_base 3: mod_base = gm
  modified_base 4: mod_base = OTHER; note = 2-O-methylribose adenine
  modified_base 5: mod_base = OTHER; note = 2-O-methylribose adenine
  modified_base 6: mod_base = um
  modified_base 7: mod_base = OTHER; note = 2-fluororibose adenine
  modified_base 8: mod_base = cm
  modified_base 9: mod_base = OTHER; note = 2-fluororibose uracil
  modified_base 10: mod_base = OTHER; note = 2-fluororibose uracil
  modified_base 11: mod_base = OTHER; note = 2-fluororibose adenine
  modified_base 12: mod_base = cm
  modified_base 13: mod_base = cm
  modified_base 14: mod_base = OTHER; note = 2-O-methylribose adenine
  modified_base 15: mod_base = OTHER; note = 2-O-methylribose adenine
  modified_base 16: mod_base = um
  modified_base 17: mod_base = OTHER; note = 2-O-methylribose adenine
  modified_base 18: mod_base = OTHER; note = 2-O-methylribose adenine
  modified_base 19: mod_base = gm
  modified_base 20: mod_base = OTHER; note = 2-O-methylribose adenine
  modified_base 20..21: mod_base = OTHER; note = phosphorothioate
  modified_base 21: mod_base = OTHER; note = 2-O-methylribose adenine
  source 1..21: mol_type = other RNA
tggaatacttaccaataagaa

SEQ ID NO: 808 - RNA, 21 nt, synthetic construct
  misc_feature 1..21: note = Synthetic: WV-42572
  misc_feature 1..21: note = Synthetic: SSR-0106389
  modified_base 1: mod_base = OTHER; note = mono GalNAc C5-amino-C6-pyrrolidine linked by phosphate to mono GalNAc C5-amino-C6-pyrrolidine linked by phosphate the 5' end of 2-O-methylribose adenine
  modified_base 1..2: mod_base = OTHER; note = phosphorothioate
  modified_base 2: mod_base = cm
  modified_base 3: mod_base = cm
  modified_base 4: mod_base = OTHER; note = 2-O-methylribose adenine
  modified_base 5: mod_base = OTHER; note = 2-O-methylribose adenine
  modified_base 6: mod_base = um
  modified_base 7: mod_base = OTHER; note = 2-fluororibose adenine
  modified_base 8: mod_base = OTHER; note = 2-O-methylribose adenine
  modified_base 9: mod_base = OTHER; note = 2-fluororibose guanine
  modified_base 10: mod_base = OTHER; note = 2-fluororibose adenine
  modified_base 11: mod_base = OTHER; note = 2-fluororibose adenine
  modified_base 12: mod_base = OTHER; note = 2-O-methylribose adenine
  modified_base 13: mod_base = OTHER; note = 2-O-methylribose adenine
  modified_base 14: mod_base = um
  modified_base 15: mod_base = gm
  modified_base 16: mod_base = OTHER; note = 2-O-methylribose adenine
  modified_base 17: mod_base = um
  modified_base 18: mod_base = um
  modified_base 19: mod_base = um
  modified_base 20: mod_base = um
  modified_base 20..21: mod_base = OTHER; note = phosphorothioate
  modified_base 21: mod_base = OTHER; note = 2-O-methylribose adenine
  source 1..21: mol_type = other RNA
accaataagaaaatgatttta

SEQ ID NO: 809 - RNA, 21 nt, synthetic construct
  misc_feature 1..21: note = Synthetic: WV-42573
  misc_feature 1..21: note = Synthetic: SSR-0106390
  modified_base 1: mod_base = OTHER; note = mono GalNAc C5-amino-C6-pyrrolidine linked by phosphate to mono GalNAc C5-amino-C6-pyrrolidine linked by phosphate the 5' end of 2-O-methylribose guanine
  modified_base 1..2: mod_base = OTHER; note = phosphorothioate
  modified_base 2: mod_base = cm
  modified_base 3: mod_base = cm
  modified_base 4: mod_base = cm
  modified_base 5: mod_base = OTHER; note = 2-O-methylribose adenine
  modified_base 6: mod_base = OTHER; note = 2-O-methylribose adenine
  modified_base 7: mod_base = OTHER; note = 2-fluororibose adenine
  modified_base 8: mod_base = OTHER; note = 2-O-methylribose adenine
  modified_base 9: mod_base = OTHER; note = 2-fluororibose cytosine
  modified_base 10: mod_base = OTHER; note = 2-fluororibose guanine
  modified_base 11: mod_base = OTHER; note = 2-fluororibose guanine
  modified_base 12: mod_base = um
  modified_base 13: mod_base = gm
  modified_base 14: mod_base = cm
  modified_base 15: mod_base = OTHER; note = 2-O-methylribose adenine
  modified_base 16: mod_base = OTHER; note = 2-O-methylribose adenine
  modified_base 17: mod_base = cm
  modified_base 18: mod_base = um
  modified_base 19: mod_base = cm
  modified_base 20: mod_base = um
  modified_base 20..21: mod_base = OTHER; note = phosphorothioate
  modified_base 21: mod_base = OTHER; note = 2-O-methylribose adenine
  source 1..21: mol_type = other RNA
gcccaaaacggtgcaactcta

SEQ ID NO: 810 - RNA, 21 nt, synthetic construct
  misc_feature 1..21: note = Synthetic: WV-42574
  misc_feature 1..21: note = Synthetic: SSR-0106391
  modified_base 1: mod_base = OTHER; note = mono GalNAc C5-amino-C6-pyrrolidine linked by phosphate to mono GalNAc C5-amino-C6-pyrrolidine linked by phosphate the 5' end of 2-O-methylribose guanine
  modified_base 1..2: mod_base = OTHER; note = phosphorothioate
  modified_base 2: mod_base = um
  modified_base 3: mod_base = gm
  modified_base 4: mod_base = cm
  modified_base 5: mod_base = OTHER; note = 2-O-methylribose adenine
  modified_base 6: mod_base = OTHER; note = 2-O-methylribose adenine
  modified_base 7: mod_base = OTHER; note = 2-fluororibose cytosine
  modified_base 8: mod_base = um
  modified_base 9: mod_base = OTHER; note = 2-fluororibose cytosine
  modified_base 10: mod_base = OTHER; note = 2-fluororibose uracil
  modified_base 11: mod_base = OTHER; note = 2-fluororibose adenine
  modified_base 12: mod_base = um
  modified_base 13: mod_base = um
  modified_base 14: mod_base = cm
  modified_base 15: mod_base = um
  modified_base 16: mod_base = gm
  modified_base 17: mod_base = gm
  modified_base 18: mod_base = OTHER; note = 2-O-methylribose adenine
  modified_base 19: mod_base = cm
  modified_base 20: mod_base = um
  modified_base 20..21: mod_base = OTHER; note = phosphorothioate
  modified_base 21: mod_base = OTHER; note = 2-O-methylribose adenine
  source 1..21: mol_type = other RNA
gtgcaactctattctggacta

SEQ ID NO: 811 - RNA, 23 nt, synthetic construct
  misc_feature 1..23: note = Synthetic: WV-42575
  misc_feature 1..23: note = Synthetic: SSR-0105017
  modified_base 1: mod_base = um
  modified_base 1..2: mod_base = OTHER; note = S-phosphorothioate
  modified_base 2: mod_base = OTHER; note = 2-fluororibose guanine
  modified_base 2..3: mod_base = OTHER; note = R-phosphorothioate
  modified_base 3: mod_base = OTHER; note = 2-O-methylribose adenine
  modified_base 3..4: mod_base = OTHER; note S-N-(1,3-dimethylimidazolidin-2-ylidene)phosphoramidate
  modified_base 4: mod_base = um
  modified_base 5: mod_base = gm
  modified_base 6: mod_base = OTHER; note = 2-fluororibose uracil
  modified_base 7: mod_base = um
  modified_base 8: mod_base = cm
  modified_base 9: mod_base = OTHER; note = 2-O-methylribose adenine
  modified_base 10: mod_base = um
  modified_base 10..11: mod_base = OTHER; note S-N-(1,3-dimethylimidazolidin-2-ylidene)phosphoramidate
  modified_base 11: mod_base = gm
  modified_base 12: mod_base = gm
  modified_base 13: mod_base = cm
  modified_base 14: mod_base = OTHER; note = 2-fluororibose uracil
  modified_base 15: mod_base = um
  modified_base 16: mod_base = OTHER; note = 2-fluororibose uracil
  modified_base 17: mod_base = gm
  modified_base 18: mod_base = cm
  modified_base 19: mod_base = um
  modified_base 19..20: mod_base = OTHER; note S-N-(1,3-dimethylimidazolidin-2-ylidene)phosphoramidate
  modified_base 20: mod_base = cm
  modified_base 21: mod_base = um
  modified_base 21..22: mod_base = OTHER; note = S-phosphorothioate
  modified_base 22: mod_base = um
  modified_base 22..23: mod_base = OTHER; note = S-phosphorothioate
  modified_base 23: mod_base = um
  source 1..23: mol_type = other RNA
tgatgttcatggctttgctcttt

SEQ ID NO: 812 - RNA, 23 nt, synthetic construct
  misc_feature 1..23: note = Synthetic: WV-42576
  misc_feature 1..23: note = Synthetic: SSR-0105054
  modified_base 1: mod_base = um
  modified_base 1..2: mod_base = OTHER; note = S-phosphorothioate
  modified_base 2: mod_base = OTHER; note = 2-fluororibose uracil
  modified_base 2..3: mod_base = OTHER; note = R-phosphorothioate
  modified_base 3: mod_base = um
  modified_base 3..4: mod_base = OTHER; note S-N-(1,3-dimethylimidazolidin-2-ylidene)phosphoramidate
  modified_base 4: mod_base = um
  modified_base 5: mod_base = cm
  modified_base 6: mod_base = OTHER; note = 2-fluororibose uracil
  modified_base 7: mod_base = OTHER; note = 2-O-methylribose adenine
  modified_base 8: mod_base = gm
  modified_base 9: mod_base = gm
  modified_base 10: mod_base = OTHER; note = 2-O-methylribose adenine
  modified_base 10..11: mod_base = OTHER; note S-N-(1,3-dimethylimidazolidin-2-ylidene)phosphoramidate
  modified_base 11: mod_base = um
  modified_base 12: mod_base = gm
  modified_base 13: mod_base = OTHER; note = 2-O-methylribose adenine
  modified_base 14: mod_base = OTHER; note = 2-fluororibose uracil
  modified_base 15: mod_base = gm
  modified_base 16: mod_base = OTHER; note = 2-fluororibose uracil
  modified_base 17: mod_base = um
  modified_base 18: mod_base = cm
  modified_base 19: mod_base = OTHER; note = 2-O-methylribose adenine
  modified_base 19..20: mod_base = OTHER; note S-N-(1,3-dimethylimidazolidin-2-ylidene)phosphoramidate
  modified_base 20: mod_base = um
  modified_base 21: mod_base = gm
  modified_base 21..22: mod_base = OTHER; note = S-phosphorothioate
  modified_base 22: mod_base = um
  modified_base 22..23: mod_base = OTHER; note = S-phosphorothioate
  modified_base 23: mod_base = um
  source 1..23: mol_type = other RNA
ttttctaggatgatgttcatgtt

SEQ ID NO: 813 - RNA, 23 nt, synthetic construct
  misc_feature 1..23: note = Synthetic: WV-42577
  misc_feature 1..23: note = Synthetic: SSR-0105011
  modified_base 1: mod_base = um
  modified_base 1..2: mod_base = OTHER; note = S-phosphorothioate
  modified_base 2: mod_base = OTHER; note = 2-fluororibose guanine
  modified_base 2..3: mod_base = OTHER; note = R-phosphorothioate
  modified_base 3: mod_base = OTHER; note = 2-O-methylribose adenine
  modified_base 3..4: mod_base = OTHER; note S-N-(1,3-dimethylimidazolidin-2-ylidene)phosphoramidate
  modified_base 4: mod_base = OTHER; note = 2-O-methylribose adenine
  modified_base 5: mod_base = gm
  modified_base 6: mod_base = OTHER; note = 2-fluororibose cytosine
  modified_base 7: mod_base = OTHER; note = 2-O-methylribose adenine
  modified_base 8: mod_base = gm
  modified_base 9: mod_base = OTHER; note = 2-O-methylribose adenine
  modified_base 10: mod_base = OTHER; note = 2-O-methylribose adenine
  modified_base 10..11: mod_base = OTHER; note S-N-(1,3-dimethylimidazolidin-2-ylidene)phosphoramidate
  modified_base 11: mod_base = gm
  modified_base 12: mod_base = gm
  modified_base 13: mod_base = OTHER; note = 2-O-methylribose adenine
  modified_base 14: mod_base = OTHER; note = 2-fluororibose uracil
  modified_base 15: mod_base = um
  modified_base 16: mod_base = OTHER; note = 2-fluororibose uracil
  modified_base 17: mod_base = cm
  modified_base 18: mod_base = um
  modified_base 19: mod_base = OTHER; note = 2-O-methylribose adenine
  modified_base 19..20: mod_base = OTHER; note S-N-(1,3-dimethylimidazolidin-2-ylidene)phosphoramidate
  modified_base 20: mod_base = gm
  modified_base 21: mod_base = gm
  modified_base 21..22: mod_base = OTHER; note = S-phosphorothioate
  modified_base 22: mod_base = um
  modified_base 22..23: mod_base = OTHER; note = S-phosphorothioate
  modified_base 23: mod_base = um
  source 1..23: mol_type = other RNA
tgaagcagaaggatttctaggtt

SEQ ID NO: 814 - RNA, 23 nt, synthetic construct
  misc_feature 1..23: note = Synthetic: WV-42578
  misc_feature 1..23: note = Synthetic: SSR-0105033
  modified_base 1: mod_base = um
  modified_base 1..2: mod_base = OTHER; note = S-phosphorothioate
  modified_base 2: mod_base = OTHER; note = 2-fluororibose guanine
  modified_base 2..3: mod_base = OTHER; note = R-phosphorothioate
  modified_base 3: mod_base = um
  modified_base 3..4: mod_base = OTHER; note S-N-(1,3-dimethylimidazolidin-2-ylidene)phosphoramidate
  modified_base 4: mod_base = OTHER; note = 2-O-methylribose adenine
  modified_base 5: mod_base = OTHER; note = 2-O-methylribose adenine
  modified_base 6: mod_base = OTHER; note = 2-fluororibose uracil
  modified_base 7: mod_base = gm
  modified_base 8: mod_base = OTHER; note = 2-O-methylribose adenine
  modified_base 9: mod_base = gm
  modified_base 10: mod_base = OTHER; note = 2-O-methylribose adenine
  modified_base 10..11: mod_base = OTHER; note S-N-(1,3-dimethylimidazolidin-2-ylidene)phosphoramidate
  modified_base 11: mod_base = OTHER; note = 2-O-methylribose adenine
  modified_base 12: mod_base = cm
  modified_base 13: mod_base = OTHER; note = 2-O-methylribose adenine
  modified_base 14: mod_base = OTHER; note = 2-fluororibose adenine
  modified_base 15: mod_base = um
  modified_base 16: mod_base = OTHER; note = 2-fluororibose cytosine
  modified_base 17: mod_base = um
  modified_base 18: mod_base = cm
  modified_base 19: mod_base = cm
  modified_base 19..20: mod_base = OTHER; note S-N-(1,3-dimethylimidazolidin-2-ylidene)phosphoramidate
  modified_base 20: mod_base = cm
  modified_base 21: mod_base = cm
  modified_base 21..22: mod_base = OTHER; note = S-phosphorothioate
  modified_base 22: mod_base = um
  modified_base 22..23: mod_base = OTHER; note = S-phosphorothioate
  modified_base 23: mod_base = um
  source 1..23: mol_type = other RNA
tgtaatgagaacaatctcccctt

SEQ ID NO: 815 - RNA, 23 nt, synthetic construct
  misc_feature 1..23: note = Synthetic: WV-42579
  misc_feature 1..23: note = Synthetic: SSR-0105039
  modified_base 1: mod_base = um
  modified_base 1..2: mod_base = OTHER; note = S-phosphorothioate
  modified_base 2: mod_base = OTHER; note = 2-fluororibose guanine
  modified_base 2..3: mod_base = OTHER; note = R-phosphorothioate
  modified_base 3: mod_base = um
  modified_base 3..4: mod_base = OTHER; note S-N-(1,3-dimethylimidazolidin-2-ylidene)phosphoramidate
  modified_base 4: mod_base = um
  modified_base 5: mod_base = OTHER; note = 2-O-methylribose adenine
  modified_base 6: mod_base = OTHER; note = 2-fluororibose cytosine
  modified_base 7: mod_base = OTHER; note = 2-O-methylribose adenine
  modified_base 8: mod_base = um
  modified_base 9: mod_base = cm
  modified_base 10: mod_base = OTHER; note = 2-O-methylribose adenine
  modified_base 10..11: mod_base = OTHER; note S-N-(1,3-dimethylimidazolidin-2-ylidene)phosphoramidate
  modified_base 11: mod_base = cm
  modified_base 12: mod_base = cm
  modified_base 13: mod_base = cm
  modified_base 14: mod_base = OTHER; note = 2-fluororibose adenine
  modified_base 15: mod_base = cm
  modified_base 16: mod_base = OTHER; note = 2-fluororibose uracil
  modified_base 17: mod_base = um
  modified_base 18: mod_base = cm
  modified_base 19: mod_base = um
  modified_base 19..20: mod_base = OTHER; note S-N-(1,3-dimethylimidazolidin-2-ylidene)phosphoramidate
  modified_base 20: mod_base = um
  modified_base 21: mod_base = um
  modified_base 21..22: mod_base = OTHER; note = S-phosphorothioate
  modified_base 22: mod_base = um
  modified_base 22..23: mod_base = OTHER; note = S-phosphorothioate
  modified_base 23: mod_base = um
  source 1..23: mol_type = other RNA
tgttacatcacccacttcttttt

SEQ ID NO: 816 - RNA, 23 nt, synthetic construct
  misc_feature 1..23: note = Synthetic: WV-42580
  misc_feature 1..23: note = Synthetic: SSR-0105034
  modified_base 1: mod_base = um
  modified_base 1..2: mod_base = OTHER; note = S-phosphorothioate
  modified_base 2: mod_base = OTHER; note = 2-fluororibose guanine
  modified_base 2..3: mod_base = OTHER; note = R-phosphorothioate
  modified_base 3: mod_base = um
  modified_base 3..4: mod_base = OTHER; note S-N-(1,3-dimethylimidazolidin-2-ylidene)phosphoramidate
  modified_base 4: mod_base = gm
  modified_base 5: mod_base = OTHER; note = 2-O-methylribose adenine
  modified_base 6: mod_base = OTHER; note = 2-fluororibose uracil
  modified_base 7: mod_base = cm
  modified_base 8: mod_base = cm
  modified_base 9: mod_base = OTHER; note = 2-O-methylribose adenine
  modified_base 10: mod_base = OTHER; note = 2-O-methylribose adenine
  modified_base 10..11: mod_base = OTHER; note S-N-(1,3-dimethylimidazolidin-2-ylidene)phosphoramidate
  modified_base 11: mod_base = OTHER; note = 2-O-methylribose adenine
  modified_base 12: mod_base = OTHER; note = 2-O-methylribose adenine
  modified_base 13: mod_base = OTHER; note = 2-O-methylribose adenine
  modified_base 14: mod_base = OTHER; note = 2-fluororibose uracil
  modified_base 15: mod_base = gm
  modified_base 16: mod_base = OTHER; note = 2-fluororibose uracil
  modified_base 17: mod_base = cm
  modified_base 18: mod_base = cm
  modified_base 19: mod_base = um
  modified_base 19..20: mod_base = OTHER; note S-N-(1,3-dimethylimidazolidin-2-ylidene)phosphoramidate
  modified_base 20: mod_base = OTHER; note = 2-O-methylribose adenine
  modified_base 21: mod_base = gm
  modified_base 21..22: mod_base = OTHER; note = S-phosphorothioate
  modified_base 22: mod_base = um
  modified_base 22..23: mod_base = OTHER; note = S-phosphorothioate
  modified_base 23: mod_base = um
  source 1..23: mol_type = other RNA
tgtgatccaaaaatgtcctagtt

SEQ ID NO: 817 - RNA, 23 nt, synthetic construct
  misc_feature 1..23: note = Synthetic: WV-42581
  misc_feature 1..23: note = Synthetic: SSR-0105013
  modified_base 1: mod_base = um
  modified_base 1..2: mod_base = OTHER; note = S-phosphorothioate
  modified_base 2: mod_base = OTHER; note = 2-fluororibose guanine
  modified_base 2..3: mod_base = OTHER; note = R-phosphorothioate
  modified_base 3: mod_base = OTHER; note = 2-O-methylribose adenine
  modified_base 3..4: mod_base = OTHER; note S-N-(1,3-dimethylimidazolidin-2-ylidene)phosphoramidate
  modified_base 4: mod_base = cm
  modified_base 5: mod_base = OTHER; note = 2-O-methylribose adenine
  modified_base 6: mod_base = OTHER; note = 2-fluororibose uracil
  modified_base 7: mod_base = gm
  modified_base 8: mod_base = OTHER; note = 2-O-methylribose adenine
  modified_base 9: mod_base = gm
  modified_base 10: mod_base = gm
  modified_base 10..11: mod_base = OTHER; note S-N-(1,3-dimethylimidazolidin-2-ylidene)phosphoramidate
  modified_base 11: mod_base = um
  modified_base 12: mod_base = um
  modified_base 13: mod_base = um
  modified_base 14: mod_base = OTHER; note = 2-fluororibose uracil
  modified_base 15: mod_base = gm
  modified_base 16: mod_base = OTHER; note = 2-fluororibose adenine
  modified_base 17: mod_base = um
  modified_base 18: mod_base = OTHER; note = 2-O-methylribose adenine
  modified_base 19: mod_base = cm
  modified_base 19..20: mod_base = OTHER; note S-N-(1,3-dimethylimidazolidin-2-ylidene)phosphoramidate
  modified_base 20: mod_base = cm
  modified_base 21: mod_base = OTHER; note = 2-O-methylribose adenine
  modified_base 21..22: mod_base = OTHER; note = S-phosphorothioate
  modified_base 22: mod_base = um
  modified_base 22..23: mod_base = OTHER; note = S-phosphorothioate
  modified_base 23: mod_base = um
  source 1..23: mol_type = other RNA
tgacatgaggttttgataccatt

SEQ ID NO: 818 - RNA, 23 nt, synthetic construct
  misc_feature 1..23: note = Synthetic: WV-42582
  misc_feature 1..23: note = Synthetic: SSR-0105053
  modified_base 1: mod_base = um
  modified_base 1..2: mod_base = OTHER; note = S-phosphorothioate
  modified_base 2: mod_base = OTHER; note = 2-fluororibose uracil
  modified_base 2..3: mod_base = OTHER; note = R-phosphorothioate
  modified_base 3: mod_base = cm
  modified_base 3..4: mod_base = OTHER; note S-N-(1,3-dimethylimidazolidin-2-ylidene)phosphoramidate
  modified_base 4: mod_base = um
  modified_base 5: mod_base = um
  modified_base 6: mod_base = OTHER; note = 2-fluororibose adenine
  modified_base 7: mod_base = um
  modified_base 8: mod_base = um
  modified_base 9: mod_base = gm
  modified_base 10: mod_base = gm
  modified_base 10..11: mod_base = OTHER; note S-N-(1,3-dimethylimidazolidin-2-ylidene)phosphoramidate
  modified_base 11: mod_base = um
  modified_base 12: mod_base = OTHER; note = 2-O-methylribose adenine
  modified_base 13: mod_base = OTHER; note = 2-O-methylribose adenine
  modified_base 14: mod_base = OTHER; note = 2-fluororibose guanine
  modified_base 15: mod_base = um
  modified_base 16: mod_base = OTHER; note = 2-fluororibose adenine
  modified_base 17: mod_base = um
  modified_base 18: mod_base = um
  modified_base 19: mod_base = cm
  modified_base 19..20: mod_base = OTHER; note S-N-(1,3-dimethylimidazolidin-2-ylidene)phosphoramidate
  modified_base 20: mod_base = cm
  modified_base 21: mod_base = OTHER; note = 2-O-methylribose adenine
  modified_base 21..22: mod_base = OTHER; note = S-phosphorothioate
  modified_base 22: mod_base = um
  modified_base 22..23: mod_base = OTHER; note = S-phosphorothioate
  modified_base 23: mod_base = um
  source 1..23: mol_type = other RNA
ttcttattggtaagtattccatt

SEQ ID NO: 819 - RNA, 21 nt, synthetic construct
  misc_feature 1..21: note = Synthetic: WV-42583
  misc_feature 1..21: note = Synthetic: SSR-0101689
  modified_base 1: mod_base = OTHER; note = triantennary GalNAc with C12 linker linked to 6-aminohexanol linked by phosphate to the 5' end of 2-O-methylribose adenine
  modified_base 1..2: mod_base = OTHER; note = S-phosphorothioate
  modified_base 2: mod_base = gm
  modified_base 3: mod_base = OTHER; note = 2-O-methylribose adenine
  modified_base 4: mod_base = gm
  modified_base 5: mod_base = cm
  modified_base 6: mod_base = OTHER; note = 2-O-methylribose adenine
  modified_base 7: mod_base = OTHER; note = 2-fluororibose adenine
  modified_base 8: mod_base = OTHER; note = 2-O-methylribose adenine
  modified_base 9: mod_base = OTHER; note = 2-fluororibose guanine
  modified_base 10: mod_base = OTHER; note = 2-fluororibose cytosine
  modified_base 11: mod_base = OTHER; note = 2-fluororibose cytosine
  modified_base 12: mod_base = OTHER; note = 2-O-methylribose adenine
  modified_base 13: mod_base = um
  modified_base 14: mod_base = gm
  modified_base 15: mod_base = OTHER; note = 2-O-methylribose adenine
  modified_base 16: mod_base = OTHER; note = 2-O-methylribose adenine
  modified_base 17: mod_base = cm
  modified_base 18: mod_base = OTHER; note = 2-O-methylribose adenine
  modified_base 19: mod_base = um
  modified_base 20: mod_base = cm
  modified_base 20..21: mod_base = OTHER; note = S-phosphorothioate
  modified_base 21: mod_base = OTHER; note = 2-O-methylribose adenine
  source 1..21: mol_type = other RNA
agagcaaagccatgaacatca

SEQ ID NO: 820 - RNA, 21 nt, synthetic construct
  misc_feature 1..21: note = Synthetic: WV-42584
  misc_feature 1..21: note = Synthetic: SSR-0101690
  modified_base 1: mod_base = OTHER; note = triantennary GalNAc with C12 linker linked to 6-aminohexanol linked by phosphate to the 5' end of 2-O-methylribose cytosine
  modified_base 1..2: mod_base = OTHER; note = S-phosphorothioate
  modified_base 2: mod_base = OTHER; note = 2-O-methylribose adenine
  modified_base 3: mod_base = um
  modified_base 4: mod_base = gm
  modified_base 5: mod_base = OTHER; note = 2-O-methylribose adenine
  modified_base 6: mod_base = OTHER; note = 2-O-methylribose adenine
  modified_base 7: mod_base = OTHER; note = 2-fluororibose cytosine
  modified_base 8: mod_base = OTHER; note = 2-O-methylribose adenine
  modified_base 9: mod_base = OTHER; note = 2-fluororibose uracil
  modified_base 10: mod_base = OTHER; note = 2-fluororibose cytosine
  modified_base 11: mod_base = OTHER; note = 2-fluororibose adenine
  modified_base 12: mod_base = um
  modified_base 13: mod_base = cm
  modified_base 14: mod_base = cm
  modified_base 15: mod_base = um
  modified_base 16: mod_base = OTHER; note = 2-O-methylribose adenine
  modified_base 17: mod_base = gm
  modified_base 18: mod_base = OTHER; note = 2-O-methylribose adenine
  modified_base 19: mod_base = OTHER; note = 2-O-methylribose adenine
  modified_base 20: mod_base = OTHER; note = 2-O-methylribose adenine
  modified_base 20..21: mod_base = OTHER; note = S-phosphorothioate
  modified_base 21: mod_base = OTHER; note = 2-O-methylribose adenine
  source 1..21: mol_type = other RNA
catgaacatcatcctagaaaa

SEQ ID NO: 821 - RNA, 21 nt, synthetic construct
  misc_feature 1..21: note = Synthetic: WV-42585
  misc_feature 1..21: note = Synthetic: SSR-0101691
  modified_base 1: mod_base = OTHER; note = triantennary GalNAc with C12 linker linked to 6-aminohexanol linked by phosphate to the 5' end of 2-O-methylribose cytosine
  modified_base 1..2: mod_base = OTHER; note = S-phosphorothioate
  modified_base 2: mod_base = cm
  modified_base 3: mod_base = um
  modified_base 4: mod_base = OTHER; note = 2-O-methylribose adenine
  modified_base 5: mod_base = gm
  modified_base 6: mod_base = OTHER; note = 2-O-methylribose adenine
  modified_base 7: mod_base = OTHER; note = 2-fluororibose adenine
  modified_base 8: mod_base = OTHER; note = 2-O-methylribose adenine
  modified_base 9: mod_base = OTHER; note = 2-fluororibose uracil
  modified_base 10: mod_base = OTHER; note = 2-fluororibose cytosine
  modified_base 11: mod_base = OTHER; note = 2-fluororibose cytosine
  modified_base 12: mod_base = um
  modified_base 13: mod_base = um
  modified_base 14: mod_base = cm
  modified_base 15: mod_base = um
  modified_base 16: mod_base = gm
  modified_base 17: mod_base = cm
  modified_base 18: mod_base = um
  modified_base 19: mod_base = um
  modified_base 20: mod_base = cm
  modified_base 20..21: mod_base = OTHER; note = S-phosphorothioate
  modified_base 21: mod_base = OTHER; note = 2-O-methylribose adenine
  source 1..21: mol_type = other RNA
cctagaaatccttctgcttca

SEQ ID NO: 822 - RNA, 21 nt, synthetic construct
  misc_feature 1..21: note = Synthetic: WV-42586
  misc_feature 1..21: note = Synthetic: SSR-0101692
  modified_base 1: mod_base = OTHER; note = triantennary GalNAc with C12 linker linked to 6-aminohexanol linked by phosphate to the 5' end of 2-O-methylribose guanine
  modified_base 1..2: mod_base = OTHER; note = S-phosphorothioate
  modified_base 2: mod_base = gm
  modified_base 3: mod_base = gm
  modified_base 4: mod_base = gm
  modified_base 5: mod_base = OTHER; note = 2-O-methylribose adenine
  modified_base 6: mod_base = gm
  modified_base 7: mod_base = OTHER; note = 2-fluororibose adenine
  modified_base 8: mod_base = um
  modified_base 9: mod_base = OTHER; note = 2-fluororibose uracil
  modified_base 10: mod_base = OTHER; note = 2-fluororibose guanine
  modified_base 11: mod_base = OTHER; note = 2-fluororibose uracil
  modified_base 12: mod_base = um
  modified_base 13: mod_base = cm
  modified_base 14: mod_base = um
  modified_base 15: mod_base = cm
  modified_base 16: mod_base = OTHER; note = 2-O-methylribose adenine
  modified_base 17: mod_base = um
  modified_base 18: mod_base = um
  modified_base 19: mod_base = OTHER; note = 2-O-methylribose adenine
  modified_base 20: mod_base = cm
  modified_base 20..21: mod_base = OTHER; note = S-phosphorothioate
  modified_base 21: mod_base = OTHER; note = 2-O-methylribose adenine
  source 1..21: mol_type = other RNA
ggggagattgttctcattaca

SEQ ID NO: 823 - RNA, 21 nt, synthetic construct
  misc_feature 1..21: note = Synthetic: WV-42587
  misc_feature 1..21: note = Synthetic: SSR-0101693
  modified_base 1: mod_base = OTHER; note = triantennary GalNAc with C12 linker linked to 6-aminohexanol linked by phosphate to the 5' end of 2-O-methylribose adenine
  modified_base 1..2: mod_base = OTHER; note = S-phosphorothioate
  modified_base 2: mod_base = OTHER; note = 2-O-methylribose adenine
  modified_base 3: mod_base = OTHER; note = 2-O-methylribose adenine
  modified_base 4: mod_base = gm
  modified_base 5: mod_base = OTHER; note = 2-O-methylribose adenine
  modified_base 6: mod_base = OTHER; note = 2-O-methylribose adenine
  modified_base 7: mod_base = OTHER; note = 2-fluororibose guanine
  modified_base 8: mod_base = um
  modified_base 9: mod_base = OTHER; note = 2-fluororibose guanine
  modified_base 10: mod_base = OTHER; note = 2-fluororibose guanine
  modified_base 11: mod_base = OTHER; note = 2-fluororibose guanine
  modified_base 12: mod_base = um
  modified_base 13: mod_base = gm
  modified_base 14: mod_base = OTHER; note = 2-O-methylribose adenine
  modified_base 15: mod_base = um
  modified_base 16: mod_base = gm
  modified_base 17: mod_base = um
  modified_base 18: mod_base = OTHER; note = 2-O-methylribose adenine
  modified_base 19: mod_base = OTHER; note = 2-O-methylribose adenine
  modified_base 20: mod_base = cm
  modified_base 20..21: mod_base = OTHER; note = S-phosphorothioate
  modified_base 21: mod_base = OTHER; note = 2-O-methylribose adenine
  source 1..21: mol_type = other RNA
aaagaagtgggtgatgtaaca

SEQ ID NO: 824 - RNA, 21 nt, synthetic construct
  misc_feature 1..21: note = Synthetic: WV-42588
  misc_feature 1..21: note = Synthetic: SSR-0101694
  modified_base 1: mod_base = OTHER; note = triantennary GalNAc with C12 linker linked to 6-aminohexanol linked by phosphate to the 5' end of 2-O-methylribose cytosine
  modified_base 1..2: mod_base = OTHER; note = S-phosphorothioate
  modified_base 2: mod_base = um
  modified_base 3: mod_base = OTHER; note = 2-O-methylribose adenine
  modified_base 4: mod_base = gm
  modified_base 5: mod_base = gm
  modified_base 6: mod_base = OTHER; note = 2-O-methylribose adenine
  modified_base 7: mod_base = OTHER; note = 2-fluororibose cytosine
  modified_base 8: mod_base = OTHER; note = 2-O-methylribose adenine
  modified_base 9: mod_base = OTHER; note = 2-fluororibose uracil
  modified_base 10: mod_base = OTHER; note = 2-fluororibose uracil
  modified_base 11: mod_base = OTHER; note = 2-fluororibose uracil
  modified_base 12: mod_base = um
  modified_base 13: mod_base = um
  modified_base 14: mod_base = gm
  modified_base 15: mod_base = gm
  modified_base 16: mod_base = OTHER; note = 2-O-methylribose adenine
  modified_base 17: mod_base = um
  modified_base 18: mod_base = cm
  modified_base 19: mod_base = OTHER; note = 2-O-methylribose adenine
  modified_base 20: mod_base = cm
  modified_base 20..21: mod_base = OTHER; note = S-phosphorothioate
  modified_base 21: mod_base = OTHER; note = 2-O-methylribose adenine
  source 1..21: mol_type = other RNA
ctaggacatttttggatcaca

SEQ ID NO: 825 - RNA, 21 nt, synthetic construct
  misc_feature 1..21: note = Synthetic: WV-42589
  misc_feature 1..21: note = Synthetic: SSR-0101695
  modified_base 1: mod_base = OTHER; note = triantennary GalNAc with C12 linker linked to 6-aminohexanol linked by phosphate to the 5' end of 2-O-methylribose uracil
  modified_base 1..2: mod_base = OTHER; note = S-phosphorothioate
  modified_base 2: mod_base = gm
  modified_base 3: mod_base = gm
  modified_base 4: mod_base = um
  modified_base 5: mod_base = OTHER; note = 2-O-methylribose adenine
  modified_base 6: mod_base = um
  modified_base 7: mod_base = OTHER; note = 2-fluororibose cytosine
  modified_base 8: mod_base = OTHER; note = 2-O-methylribose adenine
  modified_base 9: mod_base = OTHER; note = 2-fluororibose adenine
  modified_base 10: mod_base = OTHER; note = 2-fluororibose adenine
  modified_base 11: mod_base = OTHER; note = 2-fluororibose adenine
  modified_base 12: mod_base = cm
  modified_base 13: mod_base = cm
  modified_base 14: mod_base = um
  modified_base 15: mod_base = cm
  modified_base 16: mod_base = OTHER; note = 2-O-methylribose adenine
  modified_base 17: mod_base = um
  modified_base 18: mod_base = gm
  modified_base 19: mod_base = um
  modified_base 20: mod_base = cm
  modified_base 20..21: mod_base = OTHER; note = S-phosphorothioate
  modified_base 21: mod_base = OTHER; note = 2-O-methylribose adenine
  source 1..21: mol_type = other RNA
tggtatcaaaacctcatgtca

SEQ ID NO: 826 - RNA, 21 nt, synthetic construct
  misc_feature 1..21: note = Synthetic: WV-42590
  misc_feature 1..21: note = Synthetic: SSR-0101696
  modified_base 1: mod_base = OTHER; note = triantennary GalNAc with C12 linker linked to 6-aminohexanol linked by phosphate to the 5' end of 2-O-methylribose uracil
  modified_base 1..2: mod_base = OTHER; note = S-phosphorothioate
  modified_base 2: mod_base = gm
  modified_base 3: mod_base = gm
  modified_base 4: mod_base = OTHER; note = 2-O-methylribose adenine
  modified_base 5: mod_base = OTHER; note = 2-O-methylribose adenine
  modified_base 6: mod_base = um
  modified_base 7: mod_base = OTHER; note = 2-fluororibose adenine
  modified_base 8: mod_base = cm
  modified_base 9: mod_base = OTHER; note = 2-fluororibose uracil
  modified_base 10: mod_base = OTHER; note = 2-fluororibose uracil
  modified_base 11: mod_base = OTHER; note = 2-fluororibose adenine
  modified_base 12: mod_base = cm
  modified_base 13: mod_base = cm
  modified_base 14: mod_base = OTHER; note = 2-O-methylribose adenine
  modified_base 15: mod_base = OTHER; note = 2-O-methylribose adenine
  modified_base 16: mod_base = um
  modified_base 17: mod_base = OTHER; note = 2-O-methylribose adenine
  modified_base 18: mod_base = OTHER; note = 2-O-methylribose adenine
  modified_base 19: mod_base = gm
  modified_base 20: mod_base = OTHER; note = 2-O-methylribose adenine
  modified_base 20..21: mod_base = OTHER; note = S-phosphorothioate
  modified_base 21: mod_base = OTHER; note = 2-O-methylribose adenine
  source 1..21: mol_type = other RNA
tggaatacttaccaataagaa

SEQ ID NO: 827 - RNA, 21 nt, synthetic construct
  misc_feature 1..21: note = Synthetic: WV-42591
  misc_feature 1..21: note = Synthetic: SSR-0101697
  modified_base 1: mod_base = OTHER; note = 6-aminohexanol linked by phosphate to the 5' end of 2-O-methylribose adenine
  modified_base 1..2: mod_base = OTHER; note = S-phosphorothioate
  modified_base 2: mod_base = gm
  modified_base 3: mod_base = OTHER; note = 2-O-methylribose adenine
  modified_base 4: mod_base = gm
  modified_base 5: mod_base = cm
  modified_base 6: mod_base = OTHER; note = 2-O-methylribose adenine
  modified_base 7: mod_base = OTHER; note = 2-fluororibose adenine
  modified_base 8: mod_base = OTHER; note = 2-O-methylribose adenine
  modified_base 9: mod_base = OTHER; note = 2-fluororibose guanine
  modified_base 10: mod_base = OTHER; note = 2-fluororibose cytosine
  modified_base 11: mod_base = OTHER; note = 2-fluororibose cytosine
  modified_base 12: mod_base = OTHER; note = 2-O-methylribose adenine
  modified_base 13: mod_base = um
  modified_base 14: mod_base = gm
  modified_base 15: mod_base = OTHER; note = 2-O-methylribose adenine
  modified_base 16: mod_base = OTHER; note = 2-O-methylribose adenine
  modified_base 17: mod_base = cm
  modified_base 18: mod_base = OTHER; note = 2-O-methylribose adenine
  modified_base 19: mod_base = um
  modified_base 20: mod_base = cm
  modified_base 20..21: mod_base = OTHER; note = S-phosphorothioate
  modified_base 21: mod_base = OTHER; note = 2-O-methylribose adenine
  source 1..21: mol_type = other RNA
agagcaaagccatgaacatca

SEQ ID NO: 828 - RNA, 21 nt, synthetic construct
  misc_feature 1..21: note = Synthetic: WV-42592
  misc_feature 1..21: note = Synthetic: SSR-0101698
  modified_base 1: mod_base = OTHER; note = 6-aminohexanol linked by phosphate to the 5' end of 2-O-methylribose cytosine
  modified_base 1..2: mod_base = OTHER; note = S-phosphorothioate
  modified_base 2: mod_base = OTHER; note = 2-O-methylribose adenine
  modified_base 3: mod_base = um
  modified_base 4: mod_base = gm
  modified_base 5: mod_base = OTHER; note = 2-O-methylribose adenine
  modified_base 6: mod_base = OTHER; note = 2-O-methylribose adenine
  modified_base 7: mod_base = OTHER; note = 2-fluororibose cytosine
  modified_base 8: mod_base = OTHER; note = 2-O-methylribose adenine
  modified_base 9: mod_base = OTHER; note = 2-fluororibose uracil
  modified_base 10: mod_base = OTHER; note = 2-fluororibose cytosine
  modified_base 11: mod_base = OTHER; note = 2-fluororibose adenine
  modified_base 12: mod_base = um
  modified_base 13: mod_base = cm
  modified_base 14: mod_base = cm
  modified_base 15: mod_base = um
  modified_base 16: mod_base = OTHER; note = 2-O-methylribose adenine
  modified_base 17: mod_base = gm
  modified_base 18: mod_base = OTHER; note = 2-O-methylribose adenine
  modified_base 19: mod_base = OTHER; note = 2-O-methylribose adenine
  modified_base 20: mod_base = OTHER; note = 2-O-methylribose adenine
  modified_base 20..21: mod_base = OTHER; note = S-phosphorothioate
  modified_base 21: mod_base = OTHER; note = 2-O-methylribose adenine
  source 1..21: mol_type = other RNA
catgaacatcatcctagaaaa

SEQ ID NO: 829 - RNA, 21 nt, synthetic construct
  misc_feature 1..21: note = Synthetic: WV-42593
  misc_feature 1..21: note = Synthetic: SSR-0101699
  modified_base 1: mod_base = OTHER; note = 6-aminohexanol linked by phosphate to the 5' end of 2-O-methylribose cytosine
  modified_base 1..2: mod_base = OTHER; note = S-phosphorothioate
  modified_base 2: mod_base = cm
  modified_base 3: mod_base = um
  modified_base 4: mod_base = OTHER; note = 2-O-methylribose adenine
  modified_base 5: mod_base = gm
  modified_base 6: mod_base = OTHER; note = 2-O-methylribose adenine
  modified_base 7: mod_base = OTHER; note = 2-fluororibose adenine
  modified_base 8: mod_base = OTHER; note = 2-O-methylribose adenine
  modified_base 9: mod_base = OTHER; note = 2-fluororibose uracil
  modified_base 10: mod_base = OTHER; note = 2-fluororibose cytosine
  modified_base 11: mod_base = OTHER; note = 2-fluororibose cytosine
  modified_base 12: mod_base = um
  modified_base 13: mod_base = um
  modified_base 14: mod_base = cm
  modified_base 15: mod_base = um
  modified_base 16: mod_base = gm
  modified_base 17: mod_base = cm
  modified_base 18: mod_base = um
  modified_base 19: mod_base = um
  modified_base 20: mod_base = cm
  modified_base 20..21: mod_base = OTHER; note = S-phosphorothioate
  modified_base 21: mod_base = OTHER; note = 2-O-methylribose adenine
  source 1..21: mol_type = other RNA
cctagaaatccttctgcttca

SEQ ID NO: 830 - RNA, 21 nt, synthetic construct
  misc_feature 1..21: note = Synthetic: WV-42594
  misc_feature 1..21: note = Synthetic: SSR-0101700
  modified_base 1: mod_base = OTHER; note = 6-aminohexanol linked by phosphate to the 5' end of 2-O-methylribose guanine
  modified_base 1..2: mod_base = OTHER; note = S-phosphorothioate
  modified_base 2: mod_base = gm
  modified_base 3: mod_base = gm
  modified_base 4: mod_base = gm
  modified_base 5: mod_base = OTHER; note = 2-O-methylribose adenine
  modified_base 6: mod_base = gm
  modified_base 7: mod_base = OTHER; note = 2-fluororibose adenine
  modified_base 8: mod_base = um
  modified_base 9: mod_base = OTHER; note = 2-fluororibose uracil
  modified_base 10: mod_base = OTHER; note = 2-fluororibose guanine
  modified_base 11: mod_base = OTHER; note = 2-fluororibose uracil
  modified_base 12: mod_base = um
  modified_base 13: mod_base = cm
  modified_base 14: mod_base = um
  modified_base 15: mod_base = cm
  modified_base 16: mod_base = OTHER; note = 2-O-methylribose adenine
  modified_base 17: mod_base = um
  modified_base 18: mod_base = um
  modified_base 19: mod_base = OTHER; note = 2-O-methylribose adenine
  modified_base 20: mod_base = cm
  modified_base 20..21: mod_base = OTHER; note = S-phosphorothioate
  modified_base 21: mod_base = OTHER; note = 2-O-methylribose adenine
  source 1..21: mol_type = other RNA
ggggagattgttctcattaca

SEQ ID NO: 831 - RNA, 21 nt, synthetic construct
  misc_feature 1..21: note = Synthetic: WV-42595
  misc_feature 1..21: note = Synthetic: SSR-0101701
  modified_base 1: mod_base = OTHER; note = 6-aminohexanol linked by phosphate to the 5' end of 2-O-methylribose adenine
  modified_base 1..2: mod_base = OTHER; note = S-phosphorothioate
  modified_base 2: mod_base = OTHER; note = 2-O-methylribose adenine
  modified_base 3: mod_base = OTHER; note = 2-O-methylribose adenine
  modified_base 4: mod_base = gm
  modified_base 5: mod_base = OTHER; note = 2-O-methylribose adenine
  modified_base 6: mod_base = OTHER; note = 2-O-methylribose adenine
  modified_base 7: mod_base = OTHER; note = 2-fluororibose guanine
  modified_base 8: mod_base = um
  modified_base 9: mod_base = OTHER; note = 2-fluororibose guanine
  modified_base 10: mod_base = OTHER; note = 2-fluororibose guanine
  modified_base 11: mod_base = OTHER; note = 2-fluororibose guanine
  modified_base 12: mod_base = um
  modified_base 13: mod_base = gm
  modified_base 14: mod_base = OTHER; note = 2-O-methylribose adenine
  modified_base 15: mod_base = um
  modified_base 16: mod_base = gm
  modified_base 17: mod_base = um
  modified_base 18: mod_base = OTHER; note = 2-O-methylribose adenine
  modified_base 19: mod_base = OTHER; note = 2-O-methylribose adenine
  modified_base 20: mod_base = cm
  modified_base 20..21: mod_base = OTHER; note = S-phosphorothioate
  modified_base 21: mod_base = OTHER; note = 2-O-methylribose adenine
  source 1..21: mol_type = other RNA
aaagaagtgggtgatgtaaca

SEQ ID NO: 832 - RNA, 21 nt, synthetic construct
  misc_feature 1..21: note = Synthetic: WV-42596
  misc_feature 1..21: note = Synthetic: SSR-0101702
  modified_base 1: mod_base = OTHER; note = 6-aminohexanol linked by phosphate to the 5' end of 2-O-methylribose cytosine
  modified_base 1..2: mod_base = OTHER; note = S-phosphorothioate
  modified_base 2: mod_base = um
  modified_base 3: mod_base = OTHER; note = 2-O-methylribose adenine
  modified_base 4: mod_base = gm
  modified_base 5: mod_base = gm
  modified_base 6: mod_base = OTHER; note = 2-O-methylribose adenine
  modified_base 7: mod_base = OTHER; note = 2-fluororibose cytosine
  modified_base 8: mod_base = OTHER; note = 2-O-methylribose adenine
  modified_base 9: mod_base = OTHER; note = 2-fluororibose uracil
  modified_base 10: mod_base = OTHER; note = 2-fluororibose uracil
  modified_base 11: mod_base = OTHER; note = 2-fluororibose uracil
  modified_base 12: mod_base = um
  modified_base 13: mod_base = um
  modified_base 14: mod_base = gm
  modified_base 15: mod_base = gm
  modified_base 16: mod_base = OTHER; note = 2-O-methylribose adenine
  modified_base 17: mod_base = um
  modified_base 18: mod_base = cm
  modified_base 19: mod_base = OTHER; note = 2-O-methylribose adenine
  modified_base 20: mod_base = cm
  modified_base 20..21: mod_base = OTHER; note = S-phosphorothioate
  modified_base 21: mod_base = OTHER; note = 2-O-methylribose adenine
  source 1..21: mol_type = other RNA
ctaggacatttttggatcaca

SEQ ID NO: 833 - RNA, 21 nt, synthetic construct
  misc_feature 1..21: note = Synthetic: WV-42597
  misc_feature 1..21: note = Synthetic: SSR-0101703
  modified_base 1: mod_base = OTHER; note = 6-aminohexanol linked by phosphate to the 5' end of 2-O-methylribose uracil
  modified_base 1..2: mod_base = OTHER; note = S-phosphorothioate
  modified_base 2: mod_base = gm
  modified_base 3: mod_base = gm
  modified_base 4: mod_base = um
  modified_base 5: mod_base = OTHER; note = 2-O-methylribose adenine
  modified_base 6: mod_base = um
  modified_base 7: mod_base = OTHER; note = 2-fluororibose cytosine
  modified_base 8: mod_base = OTHER; note = 2-O-methylribose adenine
  modified_base 9: mod_base = OTHER; note = 2-fluororibose adenine
  modified_base 10: mod_base = OTHER; note = 2-fluororibose adenine
  modified_base 11: mod_base = OTHER; note = 2-fluororibose adenine
  modified_base 12: mod_base = cm
  modified_base 13: mod_base = cm
  modified_base 14: mod_base = um
  modified_base 15: mod_base = cm
  modified_base 16: mod_base = OTHER; note = 2-O-methylribose adenine
  modified_base 17: mod_base = um
  modified_base 18: mod_base = gm
  modified_base 19: mod_base = um
  modified_base 20: mod_base = cm
  modified_base 20..21: mod_base = OTHER; note = S-phosphorothioate
  modified_base 21: mod_base = OTHER; note = 2-O-methylribose adenine
  source 1..21: mol_type = other RNA
tggtatcaaaacctcatgtca

SEQ ID NO: 834 - RNA, 21 nt, synthetic construct
  misc_feature 1..21: note = Synthetic: WV-42598
  misc_feature 1..21: note = Synthetic: SSR-0101704
  modified_base 1: mod_base = OTHER; note = 6-aminohexanol linked by phosphate to the 5' end of 2-O-methylribose uracil
  modified_base 1..2: mod_base = OTHER; note = S-phosphorothioate
  modified_base 2: mod_base = gm
  modified_base 3: mod_base = gm
  modified_base 4: mod_base = OTHER; note = 2-O-methylribose adenine
  modified_base 5: mod_base = OTHER; note = 2-O-methylribose adenine
  modified_base 6: mod_base = um
  modified_base 7: mod_base = OTHER; note = 2-fluororibose adenine
  modified_base 8: mod_base = cm
  modified_base 9: mod_base = OTHER; note = 2-fluororibose uracil
  modified_base 10: mod_base = OTHER; note = 2-fluororibose uracil
  modified_base 11: mod_base = OTHER; note = 2-fluororibose adenine
  modified_base 12: mod_base = cm
  modified_base 13: mod_base = cm
  modified_base 14: mod_base = OTHER; note = 2-O-methylribose adenine
  modified_base 15: mod_base = OTHER; note = 2-O-methylribose adenine
  modified_base 16: mod_base = um
  modified_base 17: mod_base = OTHER; note = 2-O-methylribose adenine
  modified_base 18: mod_base = OTHER; note = 2-O-methylribose adenine
  modified_base 19: mod_base = gm
  modified_base 20: mod_base = OTHER; note = 2-O-methylribose adenine
  modified_base 20..21: mod_base = OTHER; note = S-phosphorothioate
  modified_base 21: mod_base = OTHER; note = 2-O-methylribose adenine
  source 1..21: mol_type = other RNA
tggaatacttaccaataagaa

SEQ ID NO: 835 - RNA, 23 nt, synthetic construct
  misc_feature 1..23: note = Synthetic: WV-42902
  misc_feature 1..23: note = Synthetic: SSR-0105038
  modified_base 1: mod_base = um
  modified_base 1..2: mod_base = OTHER; note = S-phosphorothioate
  modified_base 2: mod_base = OTHER; note = 2-fluororibose guanine
  modified_base 2..3: mod_base = OTHER; note = R-phosphorothioate
  modified_base 3: mod_base = um
  modified_base 3..4: mod_base = OTHER; note S-N-(1,3-dimethylimidazolidin-2-ylidene)phosphoramidate
  modified_base 4: mod_base = um
  modified_base 5: mod_base = OTHER; note = 2-O-methylribose adenine
  modified_base 6: mod_base = OTHER; note = 2-fluororibose cytosine
  modified_base 7: mod_base = OTHER; note = 2-O-methylribose adenine
  modified_base 8: mod_base = um
  modified_base 9: mod_base = cm
  modified_base 10: mod_base = OTHER; note = 2-O-methylribose adenine
  modified_base 10..11: mod_base = OTHER; note S-N-(1,3-dimethylimidazolidin-2-ylidene)phosphoramidate
  modified_base 11: mod_base = cm
  modified_base 12: mod_base = cm
  modified_base 13: mod_base = cm
  modified_base 13..14: mod_base = OTHER; note = S-phosphorothioate
  modified_base 14: mod_base = OTHER; note = 2-fluororibose adenine
  modified_base 14..15: mod_base = OTHER; note = S-phosphorothioate
  modified_base 15: mod_base = cm
  modified_base 15..16: mod_base = OTHER; note = S-phosphorothioate
  modified_base 16: mod_base = OTHER; note = 2-fluororibose uracil
  modified_base 16..17: mod_base = OTHER; note = S-phosphorothioate
  modified_base 17: mod_base = um
  modified_base 17..18: mod_base = OTHER; note = S-phosphorothioate
  modified_base 18: mod_base = cm
  modified_base 18..19: mod_base = OTHER; note = S-phosphorothioate
  modified_base 19: mod_base = um
  modified_base 19..20: mod_base = OTHER; note S-N-(1,3-dimethylimidazolidin-2-ylidene)phosphoramidate
  modified_base 20: mod_base = um
  modified_base 20..21: mod_base = OTHER; note = S-phosphorothioate
  modified_base 21: mod_base = um
  modified_base 21..22: mod_base = OTHER; note = S-phosphorothioate
  modified_base 22: mod_base = um
  modified_base 22..23: mod_base = OTHER; note = S-phosphorothioate
  modified_base 23: mod_base = um
  source 1..23: mol_type = other RNA
tgttacatcacccacttcttttt

SEQ ID NO: 836 - RNA, 23 nt, synthetic construct
  misc_feature 1..23: note = Synthetic: WV-42903
  misc_feature 1..23: note = Synthetic: SSR-0105012
  modified_base 1: mod_base = um
  modified_base 1..2: mod_base = OTHER; note = S-phosphorothioate
  modified_base 2: mod_base = OTHER; note = 2-fluororibose guanine
  modified_base 2..3: mod_base = OTHER; note = R-phosphorothioate
  modified_base 3: mod_base = OTHER; note = 2-O-methylribose adenine
  modified_base 3..4: mod_base = OTHER; note S-N-(1,3-dimethylimidazolidin-2-ylidene)phosphoramidate
  modified_base 4: mod_base = cm
  modified_base 5: mod_base = OTHER; note = 2-O-methylribose adenine
  modified_base 6: mod_base = OTHER; note = 2-fluororibose uracil
  modified_base 7: mod_base = gm
  modified_base 8: mod_base = OTHER; note = 2-O-methylribose adenine
  modified_base 9: mod_base = gm
  modified_base 10: mod_base = gm
  modified_base 10..11: mod_base = OTHER; note S-N-(1,3-dimethylimidazolidin-2-ylidene)phosphoramidate
  modified_base 11: mod_base = um
  modified_base 12: mod_base = um
  modified_base 13: mod_base = um
  modified_base 13..14: mod_base = OTHER; note = S-phosphorothioate
  modified_base 14: mod_base = OTHER; note = 2-fluororibose uracil
  modified_base 14..15: mod_base = OTHER; note = S-phosphorothioate
  modified_base 15: mod_base = gm
  modified_base 15..16: mod_base = OTHER; note = S-phosphorothioate
  modified_base 16: mod_base = OTHER; note = 2-fluororibose adenine
  modified_base 16..17: mod_base = OTHER; note = S-phosphorothioate
  modified_base 17: mod_base = um
  modified_base 17..18: mod_base = OTHER; note = S-phosphorothioate
  modified_base 18: mod_base = OTHER; note = 2-O-methylribose adenine
  modified_base 18..19: mod_base = OTHER; note = S-phosphorothioate
  modified_base 19: mod_base = cm
  modified_base 19..20: mod_base = OTHER; note S-N-(1,3-dimethylimidazolidin-2-ylidene)phosphoramidate
  modified_base 20: mod_base = cm
  modified_base 20..21: mod_base = OTHER; note = S-phosphorothioate
  modified_base 21: mod_base = OTHER; note = 2-O-methylribose adenine
  modified_base 21..22: mod_base = OTHER; note = S-phosphorothioate
  modified_base 22: mod_base = um
  modified_base 22..23: mod_base = OTHER; note = S-phosphorothioate
  modified_base 23: mod_base = um
  source 1..23: mol_type = other RNA
tgacatgaggttttgataccatt

SEQ ID NO: 837 - RNA, 23 nt, synthetic construct
  misc_feature 1..23: note = Synthetic: WV-43130
  misc_feature 1..23: note = Synthetic: SSR-0105121
  modified_base 1: mod_base = um
  modified_base 1..2: mod_base = OTHER; note = phosphorothioate
  modified_base 2: mod_base = OTHER; note = 2-fluororibose guanine
  modified_base 2..3: mod_base = OTHER; note = phosphorothioate
  modified_base 3: mod_base = um
  modified_base 4: mod_base = um
  modified_base 5: mod_base = gm
  modified_base 6: mod_base = OTHER; note = 2-fluororibose cytosine
  modified_base 7: mod_base = um
  modified_base 8: mod_base = gm
  modified_base 9: mod_base = cm
  modified_base 10: mod_base = OTHER; note = 2-O-methylribose adenine
  modified_base 11: mod_base = gm
  modified_base 12: mod_base = um
  modified_base 13: mod_base = cm
  modified_base 14: mod_base = OTHER; note = 2-fluororibose uracil
  modified_base 15: mod_base = OTHER; note = 2-O-methylribose adenine
  modified_base 16: mod_base = OTHER; note = 2-fluororibose cytosine
  modified_base 17: mod_base = cm
  modified_base 18: mod_base = OTHER; note = 2-O-methylribose adenine
  modified_base 19: mod_base = cm
  modified_base 20: mod_base = OTHER; note = 2-O-methylribose adenine
  modified_base 21: mod_base = um
  modified_base 21..22: mod_base = OTHER; note = phosphorothioate
  modified_base 22: mod_base = um
  modified_base 22..23: mod_base = OTHER; note = phosphorothioate
  modified_base 23: mod_base = um
  source 1..23: mol_type = other RNA
tgttgctgcagtctaccacattt

SEQ ID NO: 838 - RNA, 23 nt, synthetic construct
  misc_feature 1..23: note = Synthetic: WV-43131
  misc_feature 1..23: note = Synthetic: SSR-0105097
  modified_base 1: mod_base = um
  modified_base 1..2: mod_base = OTHER; note = phosphorothioate
  modified_base 2: mod_base = OTHER; note = 2-fluororibose cytosine
  modified_base 2..3: mod_base = OTHER; note = phosphorothioate
  modified_base 3: mod_base = um
  modified_base 4: mod_base = gm
  modified_base 5: mod_base = um
  modified_base 6: mod_base = OTHER; note = 2-fluororibose uracil
  modified_base 7: mod_base = gm
  modified_base 8: mod_base = cm
  modified_base 9: mod_base = um
  modified_base 10: mod_base = gm
  modified_base 11: mod_base = cm
  modified_base 12: mod_base = OTHER; note = 2-O-methylribose adenine
  modified_base 13: mod_base = gm
  modified_base 14: mod_base = OTHER; note = 2-fluororibose uracil
  modified_base 15: mod_base = cm
  modified_base 16: mod_base = OTHER; note = 2-fluororibose uracil
  modified_base 17: mod_base = OTHER; note = 2-O-methylribose adenine
  modified_base 18: mod_base = cm
  modified_base 19: mod_base = cm
  modified_base 20: mod_base = OTHER; note = 2-O-methylribose adenine
  modified_base 21: mod_base = cm
  modified_base 21..22: mod_base = OTHER; note = phosphorothioate
  modified_base 22: mod_base = um
  modified_base 22..23: mod_base = OTHER; note = phosphorothioate
  modified_base 23: mod_base = um
  source 1..23: mol_type = other RNA
tctgttgctgcagtctaccactt

SEQ ID NO: 839 - RNA, 23 nt, synthetic construct
  misc_feature 1..23: note = Synthetic: WV-43132
  misc_feature 1..23: note = Synthetic: SSR-0105086
  modified_base 1: mod_base = um
  modified_base 1..2: mod_base = OTHER; note = phosphorothioate
  modified_base 2: mod_base = OTHER; note = 2-fluororibose cytosine
  modified_base 2..3: mod_base = OTHER; note = phosphorothioate
  modified_base 3: mod_base = OTHER; note = 2-O-methylribose adenine
  modified_base 4: mod_base = OTHER; note = 2-O-methylribose adenine
  modified_base 5: mod_base = OTHER; note = 2-O-methylribose adenine
  modified_base 6: mod_base = OTHER; note = 2-fluororibose adenine
  modified_base 7: mod_base = OTHER; note = 2-O-methylribose adenine
  modified_base 8: mod_base = um
  modified_base 9: mod_base = gm
  modified_base 10: mod_base = um
  modified_base 11: mod_base = cm
  modified_base 12: mod_base = cm
  modified_base 13: mod_base = um
  modified_base 14: mod_base = OTHER; note = 2-fluororibose adenine
  modified_base 15: mod_base = gm
  modified_base 16: mod_base = OTHER; note = 2-fluororibose guanine
  modified_base 17: mod_base = OTHER; note = 2-O-methylribose adenine
  modified_base 18: mod_base = um
  modified_base 19: mod_base = gm
  modified_base 20: mod_base = um
  modified_base 21: mod_base = um
  modified_base 21..22: mod_base = OTHER; note = phosphorothioate
  modified_base 22: mod_base = um
  modified_base 22..23: mod_base = OTHER; note = phosphorothioate
  modified_base 23: mod_base = um
  source 1..23: mol_type = other RNA
tcaaaaatgtcctaggatgtttt

SEQ ID NO: 840 - RNA, 23 nt, synthetic construct
  misc_feature 1..23: note = Synthetic: WV-43133
  misc_feature 1..23: note = Synthetic: SSR-0105063
  modified_base 1: mod_base = um
  modified_base 1..2: mod_base = OTHER; note = phosphorothioate
  modified_base 2: mod_base = OTHER; note = 2-fluororibose adenine
  modified_base 2..3: mod_base = OTHER; note = phosphorothioate
  modified_base 3: mod_base = OTHER; note = 2-O-methylribose adenine
  modified_base 4: mod_base = um
  modified_base 5: mod_base = OTHER; note = 2-O-methylribose adenine
  modified_base 6: mod_base = OTHER; note = 2-fluororibose uracil
  modified_base 7: mod_base = um
  modified_base 8: mod_base = cm
  modified_base 9: mod_base = um
  modified_base 10: mod_base = gm
  modified_base 11: mod_base = cm
  modified_base 12: mod_base = OTHER; note = 2-O-methylribose adenine
  modified_base 13: mod_base = um
  modified_base 14: mod_base = OTHER; note = 2-fluororibose adenine
  modified_base 15: mod_base = cm
  modified_base 16: mod_base = OTHER; note = 2-fluororibose guanine
  modified_base 17: mod_base = OTHER; note = 2-O-methylribose adenine
  modified_base 18: mod_base = um
  modified_base 19: mod_base = um
  modified_base 20: mod_base = um
  modified_base 21: mod_base = OTHER; note = 2-O-methylribose adenine
  modified_base 21..22: mod_base = OTHER; note = phosphorothioate
  modified_base 22: mod_base = um
  modified_base 22..23: mod_base = OTHER; note = phosphorothioate
  modified_base 23: mod_base = um
  source 1..23: mol_type = other RNA
taatattctgcatacgatttatt

SEQ ID NO: 841 - RNA, 23 nt, synthetic construct
  misc_feature 1..23: note = Synthetic: WV-43134
  misc_feature 1..23: note = Synthetic: SSR-0105140
  modified_base 1: mod_base = um
  modified_base 1..2: mod_base = OTHER; note = phosphorothioate
  modified_base 2: mod_base = OTHER; note = 2-fluororibose uracil
  modified_base 2..3: mod_base = OTHER; note = phosphorothioate
  modified_base 3: mod_base = um
  modified_base 4: mod_base = gm
  modified_base 5: mod_base = OTHER; note = 2-O-methylribose adenine
  modified_base 6: mod_base = OTHER; note = 2-fluororibose adenine
  modified_base 7: mod_base = um
  modified_base 8: mod_base = OTHER; note = 2-O-methylribose adenine
  modified_base 9: mod_base = um
  modified_base 10: mod_base = um
  modified_base 11: mod_base = cm
  modified_base 12: mod_base = um
  modified_base 13: mod_base = gm
  modified_base 14: mod_base = OTHER; note = 2-fluororibose cytosine
  modified_base 15: mod_base = OTHER; note = 2-O-methylribose adenine
  modified_base 16: mod_base = OTHER; note = 2-fluororibose uracil
  modified_base 17: mod_base = OTHER; note = 2-O-methylribose adenine
  modified_base 18: mod_base = cm
  modified_base 19: mod_base = gm
  modified_base 20: mod_base = OTHER; note = 2-O-methylribose adenine
  modified_base 21: mod_base = um
  modified_base 21..22: mod_base = OTHER; note = phosphorothioate
  modified_base 22: mod_base = um
  modified_base 22..23: mod_base = OTHER; note = phosphorothioate
  modified_base 23: mod_base = um
  source 1..23: mol_type = other RNA
tttgaatattctgcatacgattt

SEQ ID NO: 842 - RNA, 23 nt, synthetic construct
  misc_feature 1..23: note = Synthetic: WV-43135
  misc_feature 1..23: note = Synthetic: SSR-0105064
  modified_base 1: mod_base = um
  modified_base 1..2: mod_base = OTHER; note = phosphorothioate
  modified_base 2: mod_base = OTHER; note = 2-fluororibose adenine
  modified_base 2..3: mod_base = OTHER; note = phosphorothioate
  modified_base 3: mod_base = OTHER; note = 2-O-methylribose adenine
  modified_base 4: mod_base = um
  modified_base 5: mod_base = um
  modified_base 6: mod_base = OTHER; note = 2-fluororibose guanine
  modified_base 7: mod_base = OTHER; note = 2-O-methylribose adenine
  modified_base 8: mod_base = OTHER; note = 2-O-methylribose adenine
  modified_base 9: mod_base = um
  modified_base 10: mod_base = OTHER; note = 2-O-methylribose adenine
  modified_base 11: mod_base = um
  modified_base 12: mod_base = um
  modified_base 13: mod_base = cm
  modified_base 14: mod_base = OTHER; note = 2-fluororibose uracil
  modified_base 15: mod_base = gm
  modified_base 16: mod_base = OTHER; note = 2-fluororibose cytosine
  modified_base 17: mod_base = OTHER; note = 2-O-methylribose adenine
  modified_base 18: mod_base = um
  modified_base 19: mod_base = OTHER; note = 2-O-methylribose adenine
  modified_base 20: mod_base = cm
  modified_base 21: mod_base = gm
  modified_base 21..22: mod_base = OTHER; note = phosphorothioate
  modified_base 22: mod_base = um
  modified_base 22..23: mod_base = OTHER; note = phosphorothioate
  modified_base 23: mod_base = um
  source 1..23: mol_type = other RNA
taattgaatattctgcatacgtt

SEQ ID NO: 843 - RNA, 23 nt, synthetic construct
  misc_feature 1..23: note = Synthetic: WV-43136
  misc_feature 1..23: note = Synthetic: SSR-0105087
  modified_base 1: mod_base = um
  modified_base 1..2: mod_base = OTHER; note = phosphorothioate
  modified_base 2: mod_base = OTHER; note = 2-fluororibose cytosine
  modified_base 2..3: mod_base = OTHER; note = phosphorothioate
  modified_base 3: mod_base = OTHER; note = 2-O-methylribose adenine
  modified_base 4: mod_base = OTHER; note = 2-O-methylribose adenine
  modified_base 5: mod_base = OTHER; note = 2-O-methylribose adenine
  modified_base 6: mod_base = OTHER; note = 2-fluororibose uracil
  modified_base 7: mod_base = um
  modified_base 8: mod_base = gm
  modified_base 9: mod_base = OTHER; note = 2-O-methylribose adenine
  modified_base 10: mod_base = OTHER; note = 2-O-methylribose adenine
  modified_base 11: mod_base = um
  modified_base 12: mod_base = OTHER; note = 2-O-methylribose adenine
  modified_base 13: mod_base = um
  modified_base 14: mod_base = OTHER; note = 2-fluororibose uracil
  modified_base 15: mod_base = cm
  modified_base 16: mod_base = OTHER; note = 2-fluororibose uracil
  modified_base 17: mod_base = gm
  modified_base 18: mod_base = cm
  modified_base 19: mod_base = OTHER; note = 2-O-methylribose adenine
  modified_base 20: mod_base = um
  modified_base 21: mod_base = OTHER; note = 2-O-methylribose adenine
  modified_base 21..22: mod_base = OTHER; note = phosphorothioate
  modified_base 22: mod_base = um
  modified_base 22..23: mod_base = OTHER; note = phosphorothioate
  modified_base 23: mod_base = um
  source 1..23: mol_type = other RNA
tcaaattgaatattctgcatatt

SEQ ID NO: 844 - RNA, 23 nt, synthetic construct
  misc_feature 1..23: note = Synthetic: WV-43137
  misc_feature 1..23: note = Synthetic: SSR-0105061
  modified_base 1: mod_base = um
  modified_base 1..2: mod_base = OTHER; note = phosphorothioate
  modified_base 2: mod_base = OTHER; note = 2-fluororibose adenine
  modified_base 2..3: mod_base = OTHER; note = phosphorothioate
  modified_base 3: mod_base = OTHER; note = 2-O-methylribose adenine
  modified_base 4: mod_base = gm
  modified_base 5: mod_base = um
  modified_base 6: mod_base = OTHER; note = 2-fluororibose cytosine
  modified_base 7: mod_base = cm
  modified_base 8: mod_base = OTHER; note = 2-O-methylribose adenine
  modified_base 9: mod_base = gm
  modified_base 10: mod_base = OTHER; note = 2-O-methylribose adenine
  modified_base 11: mod_base = OTHER; note = 2-O-methylribose adenine
  modified_base 12: mod_base = um
  modified_base 13: mod_base = OTHER; note = 2-O-methylribose adenine
  modified_base 14: mod_base = OTHER; note = 2-fluororibose guanine
  modified_base 15: mod_base = OTHER; note = 2-O-methylribose adenine
  modified_base 16: mod_base = OTHER; note = 2-fluororibose guanine
  modified_base 17: mod_base = um
  modified_base 18: mod_base = um
  modified_base 19: mod_base = gm
  modified_base 20: mod_base = cm
  modified_base 21: mod_base = OTHER; note = 2-O-methylribose adenine
  modified_base 21..22: mod_base = OTHER; note = phosphorothioate
  modified_base 22: mod_base = um
  modified_base 22..23: mod_base = OTHER; note = phosphorothioate
  modified_base 23: mod_base = um
  source 1..23: mol_type = other RNA
taagtccagaatagagttgcatt

SEQ ID NO: 845 - RNA, 23 nt, synthetic construct
  misc_feature 1..23: note = Synthetic: WV-43138
  misc_feature 1..23: note = Synthetic: SSR-0105122
  modified_base 1: mod_base = um
  modified_base 1..2: mod_base = OTHER; note = phosphorothioate
  modified_base 2: mod_base = OTHER; note = 2-fluororibose uracil
  modified_base 2..3: mod_base = OTHER; note = phosphorothioate
  modified_base 3: mod_base = OTHER; note = 2-O-methylribose adenine
  modified_base 4: mod_base = OTHER; note = 2-O-methylribose adenine
  modified_base 5: mod_base = OTHER; note = 2-O-methylribose adenine
  modified_base 6: mod_base = OTHER; note = 2-fluororibose guanine
  modified_base 7: mod_base = um
  modified_base 8: mod_base = cm
  modified_base 9: mod_base = cm
  modified_base 10: mod_base = OTHER; note = 2-O-methylribose adenine
  modified_base 11: mod_base = gm
  modified_base 12: mod_base = OTHER; note = 2-O-methylribose adenine
  modified_base 13: mod_base = OTHER; note = 2-O-methylribose adenine
  modified_base 14: mod_base = OTHER; note = 2-fluororibose uracil
  modified_base 15: mod_base = OTHER; note = 2-O-methylribose adenine
  modified_base 16: mod_base = OTHER; note = 2-fluororibose guanine
  modified_base 17: mod_base = OTHER; note = 2-O-methylribose adenine
  modified_base 18: mod_base = gm
  modified_base 19: mod_base = um
  modified_base 20: mod_base = um
  modified_base 21: mod_base = gm
  modified_base 21..22: mod_base = OTHER; note = phosphorothioate
  modified_base 22: mod_base = um
  modified_base 22..23: mod_base = OTHER; note = phosphorothioate
  modified_base 23: mod_base = um
  source 1..23: mol_type = other RNA
ttaaagtccagaatagagttgtt

SEQ ID NO: 846 - RNA, 23 nt, synthetic construct
  misc_feature 1..23: note = Synthetic: WV-43139
  misc_feature 1..23: note = Synthetic: SSR-0105090
  modified_base 1: mod_base = um
  modified_base 1..2: mod_base = OTHER; note = phosphorothioate
  modified_base 2: mod_base = OTHER; note = 2-fluororibose cytosine
  modified_base 2..3: mod_base = OTHER; note = phosphorothioate
  modified_base 3: mod_base = OTHER; note = 2-O-methylribose adenine
  modified_base 4: mod_base = OTHER; note = 2-O-methylribose adenine
  modified_base 5: mod_base = gm
  modified_base 6: mod_base = OTHER; note = 2-fluororibose uracil
  modified_base 7: mod_base = OTHER; note = 2-O-methylribose adenine
  modified_base 8: mod_base = OTHER; note = 2-O-methylribose adenine
  modified_base 9: mod_base = um
  modified_base 10: mod_base = OTHER; note = 2-O-methylribose adenine
  modified_base 11: mod_base = OTHER; note = 2-O-methylribose adenine
  modified_base 12: mod_base = OTHER; note = 2-O-methylribose adenine
  modified_base 13: mod_base = gm
  modified_base 14: mod_base = OTHER; note = 2-fluororibose uracil
  modified_base 15: mod_base = cm
  modified_base 16: mod_base = OTHER; note = 2-fluororibose cytosine
  modified_base 17: mod_base = OTHER; note = 2-O-methylribose adenine
  modified_base 18: mod_base = gm
  modified_base 19: mod_base = OTHER; note = 2-O-methylribose adenine
  modified_base 20: mod_base = OTHER; note = 2-O-methylribose adenine
  modified_base 21: mod_base = um
  modified_base 21..22: mod_base = OTHER; note = phosphorothioate
  modified_base 22: mod_base = um
  modified_base 22..23: mod_base = OTHER; note = phosphorothioate
  modified_base 23: mod_base = um
  source 1..23: mol_type = other RNA
tcaagtaataaagtccagaattt

SEQ ID NO: 847 - RNA, 23 nt, synthetic construct
  misc_feature 1..23: note = Synthetic: WV-43140
  misc_feature 1..23: note = Synthetic: SSR-0105106
  modified_base 1: mod_base = um
  modified_base 1..2: mod_base = OTHER; note = phosphorothioate
  modified_base 2: mod_base = OTHER; note = 2-fluororibose guanine
  modified_base 2..3: mod_base = OTHER; note = phosphorothioate
  modified_base 3: mod_base = OTHER; note = 2-O-methylribose adenine
  modified_base 4: mod_base = gm
  modified_base 5: mod_base = gm
  modified_base 6: mod_base = OTHER; note = 2-fluororibose guanine
  modified_base 7: mod_base = um
  modified_base 8: mod_base = cm
  modified_base 9: mod_base = cm
  modified_base 10: mod_base = OTHER; note = 2-O-methylribose adenine
  modified_base 11: mod_base = cm
  modified_base 12: mod_base = um
  modified_base 13: mod_base = um
  modified_base 14: mod_base = OTHER; note = 2-fluororibose uracil
  modified_base 15: mod_base = um
  modified_base 16: mod_base = OTHER; note = 2-fluororibose guanine
  modified_base 17: mod_base = gm
  modified_base 18: mod_base = um
  modified_base 19: mod_base = gm
  modified_base 20: mod_base = gm
  modified_base 21: mod_base = OTHER; note = 2-O-methylribose adenine
  modified_base 21..22: mod_base = OTHER; note = phosphorothioate
  modified_base 22: mod_base = um
  modified_base 22..23: mod_base = OTHER; note = phosphorothioate
  modified_base 23: mod_base = um
  source 1..23: mol_type = other RNA
tgagggtccacttttggtggatt

SEQ ID NO: 848 - RNA, 23 nt, synthetic construct
  misc_feature 1..23: note = Synthetic: WV-43141
  misc_feature 1..23: note = Synthetic: SSR-0105068
  modified_base 1: mod_base = um
  modified_base 1..2: mod_base = OTHER; note = phosphorothioate
  modified_base 2: mod_base = OTHER; note = 2-fluororibose adenine
  modified_base 2..3: mod_base = OTHER; note = phosphorothioate
  modified_base 3: mod_base = gm
  modified_base 4: mod_base = OTHER; note = 2-O-methylribose adenine
  modified_base 5: mod_base = gm
  modified_base 6: mod_base = OTHER; note = 2-fluororibose guanine
  modified_base 7: mod_base = gm
  modified_base 8: mod_base = um
  modified_base 9: mod_base = cm
  modified_base 10: mod_base = cm
  modified_base 11: mod_base = OTHER; note = 2-O-methylribose adenine
  modified_base 12: mod_base = cm
  modified_base 13: mod_base = um
  modified_base 14: mod_base = OTHER; note = 2-fluororibose uracil
  modified_base 15: mod_base = um
  modified_base 16: mod_base = OTHER; note = 2-fluororibose uracil
  modified_base 17: mod_base = gm
  modified_base 18: mod_base = gm
  modified_base 19: mod_base = um
  modified_base 20: mod_base = gm
  modified_base 21: mod_base = gm
  modified_base 21..22: mod_base = OTHER; note = phosphorothioate
  modified_base 22: mod_base = um
  modified_base 22..23: mod_base = OTHER; note = phosphorothioate
  modified_base 23: mod_base = um
  source 1..23: mol_type = other RNA
tagagggtccacttttggtggtt

SEQ ID NO: 849 - RNA, 23 nt, synthetic construct
  misc_feature 1..23: note = Synthetic: WV-43142
  misc_feature 1..23: note = Synthetic: SSR-0105081
  modified_base 1: mod_base = um
  modified_base 1..2: mod_base = OTHER; note = phosphorothioate
  modified_base 2: mod_base = OTHER; note = 2-fluororibose adenine
  modified_base 2..3: mod_base = OTHER; note = phosphorothioate
  modified_base 3: mod_base = um
  modified_base 4: mod_base = OTHER; note = 2-O-methylribose adenine
  modified_base 5: mod_base = gm
  modified_base 6: mod_base = OTHER; note = 2-fluororibose adenine
  modified_base 7: mod_base = gm
  modified_base 8: mod_base = gm
  modified_base 9: mod_base = gm
  modified_base 10: mod_base = um
  modified_base 11: mod_base = cm
  modified_base 12: mod_base = cm
  modified_base 13: mod_base = OTHER; note = 2-O-methylribose adenine
  modified_base 14: mod_base = OTHER; note = 2-fluororibose cytosine
  modified_base 15: mod_base = um
  modified_base 16: mod_base = OTHER; note = 2-fluororibose uracil
  modified_base 17: mod_base = um
  modified_base 18: mod_base = um
  modified_base 19: mod_base = gm
  modified_base 20: mod_base = gm
  modified_base 21: mod_base = um
  modified_base 21..22: mod_base = OTHER; note = phosphorothioate
  modified_base 22: mod_base = um
  modified_base 22..23: mod_base = OTHER; note = phosphorothioate
  modified_base 23: mod_base = um
  source 1..23: mol_type = other RNA
tatagagggtccacttttggttt

SEQ ID NO: 850 - RNA, 23 nt, synthetic construct
  misc_feature 1..23: note = Synthetic: WV-43143
  misc_feature 1..23: note = Synthetic: SSR-0105128
  modified_base 1: mod_base = um
  modified_base 1..2: mod_base = OTHER; note = phosphorothioate
  modified_base 2: mod_base = OTHER; note = 2-fluororibose uracil
  modified_base 2..3: mod_base = OTHER; note = phosphorothioate
  modified_base 3: mod_base = OTHER; note = 2-O-methylribose adenine
  modified_base 4: mod_base = um
  modified_base 5: mod_base = OTHER; note = 2-O-methylribose adenine
  modified_base 6: mod_base = OTHER; note = 2-fluororibose guanine
  modified_base 7: mod_base = OTHER; note = 2-O-methylribose adenine
  modified_base 8: mod_base = gm
  modified_base 9: mod_base = gm
  modified_base 10: mod_base = gm
  modified_base 11: mod_base = um
  modified_base 12: mod_base = cm
  modified_base 13: mod_base = cm
  modified_base 14: mod_base = OTHER; note = 2-fluororibose adenine
  modified_base 15: mod_base = cm
  modified_base 16: mod_base = OTHER; note = 2-fluororibose uracil
  modified_base 17: mod_base = um
  modified_base 18: mod_base = um
  modified_base 19: mod_base = um
  modified_base 20: mod_base = gm
  modified_base 21: mod_base = gm
  modified_base 21..22: mod_base = OTHER; note = phosphorothioate
  modified_base 22: mod_base = um
  modified_base 22..23: mod_base = OTHER; note = phosphorothioate
  modified_base 23: mod_base = um
  source 1..23: mol_type = other RNA
ttatagagggtccacttttggtt

SEQ ID NO: 851 - RNA, 23 nt, synthetic construct
  misc_feature 1..23: note = Synthetic: WV-43144
  misc_feature 1..23: note = Synthetic: SSR-0105059
  modified_base 1: mod_base = um
  modified_base 1..2: mod_base = OTHER; note = phosphorothioate
  modified_base 2: mod_base = OTHER; note = 2-fluororibose adenine
  modified_base 2..3: mod_base = OTHER; note = phosphorothioate
  modified_base 3: mod_base = OTHER; note = 2-O-methylribose adenine
  modified_base 4: mod_base = gm
  modified_base 5: mod_base = gm
  modified_base 6: mod_base = OTHER; note = 2-fluororibose guanine
  modified_base 7: mod_base = OTHER; note = 2-O-methylribose adenine
  modified_base 8: mod_base = gm
  modified_base 9: mod_base = gm
  modified_base 10: mod_base = OTHER; note = 2-O-methylribose adenine
  modified_base 11: mod_base = OTHER; note = 2-O-methylribose adenine
  modified_base 12: mod_base = OTHER; note = 2-O-methylribose adenine
  modified_base 13: mod_base = um
  modified_base 14: mod_base = OTHER; note = 2-fluororibose adenine
  modified_base 15: mod_base = um
  modified_base 16: mod_base = OTHER; note = 2-fluororibose adenine
  modified_base 17: mod_base = gm
  modified_base 18: mod_base = OTHER; note = 2-O-methylribose adenine
  modified_base 19: mod_base = gm
  modified_base 20: mod_base = gm
  modified_base 21: mod_base = gm
  modified_base 21..22: mod_base = OTHER; note = phosphorothioate
  modified_base 22: mod_base = um
  modified_base 22..23: mod_base = OTHER; note = phosphorothioate
  modified_base 23: mod_base = um
  source 1..23: mol_type = other RNA
taagggaggaaatatagagggtt

SEQ ID NO: 852 - RNA, 23 nt, synthetic construct
  misc_feature 1..23: note = Synthetic: WV-43145
  misc_feature 1..23: note = Synthetic: SSR-0105145
  modified_base 1: mod_base = um
  modified_base 1..2: mod_base = OTHER; note = phosphorothioate
  modified_base 2: mod_base = OTHER; note = 2-fluororibose uracil
  modified_base 2..3: mod_base = OTHER; note = phosphorothioate
  modified_base 3: mod_base = um
  modified_base 4: mod_base = um
  modified_base 5: mod_base = um
  modified_base 6: mod_base = OTHER; note = 2-fluororibose guanine
  modified_base 7: mod_base = OTHER; note = 2-O-methylribose adenine
  modified_base 8: mod_base = gm
  modified_base 9: mod_base = cm
  modified_base 10: mod_base = cm
  modified_base 11: mod_base = um
  modified_base 12: mod_base = OTHER; note = 2-O-methylribose adenine
  modified_base 13: mod_base = OTHER; note = 2-O-methylribose adenine
  modified_base 14: mod_base = OTHER; note = 2-fluororibose adenine
  modified_base 15: mod_base = OTHER; note = 2-O-methylribose adenine
  modified_base 16: mod_base = OTHER; note = 2-fluororibose uracil
  modified_base 17: mod_base = um
  modified_base 18: mod_base = gm
  modified_base 19: mod_base = um
  modified_base 20: mod_base = cm
  modified_base 21: mod_base = um
  modified_base 21..22: mod_base = OTHER; note = phosphorothioate
  modified_base 22: mod_base = um
  modified_base 22..23: mod_base = OTHER; note = phosphorothioate
  modified_base 23: mod_base = um
  source 1..23: mol_type = other RNA
tttttgagcctaaaattgtcttt

SEQ ID NO: 853 - RNA, 23 nt, synthetic construct
  misc_feature 1..23: note = Synthetic: WV-43146
  misc_feature 1..23: note = Synthetic: SSR-0105125
  modified_base 1: mod_base = um
  modified_base 1..2: mod_base = OTHER; note = phosphorothioate
  modified_base 2: mod_base = OTHER; note = 2-fluororibose uracil
  modified_base 2..3: mod_base = OTHER; note = phosphorothioate
  modified_base 3: mod_base = OTHER; note = 2-O-methylribose adenine
  modified_base 4: mod_base = OTHER; note = 2-O-methylribose adenine
  modified_base 5: mod_base = um
  modified_base 6: mod_base = OTHER; note = 2-fluororibose adenine
  modified_base 7: mod_base = gm
  modified_base 8: mod_base = cm
  modified_base 9: mod_base = cm
  modified_base 10: mod_base = OTHER; note = 2-O-methylribose adenine
  modified_base 11: mod_base = gm
  modified_base 12: mod_base = um
  modified_base 13: mod_base = OTHER; note = 2-O-methylribose adenine
  modified_base 14: mod_base = OTHER; note = 2-fluororibose cytosine
  modified_base 15: mod_base = OTHER; note = 2-O-methylribose adenine
  modified_base 16: mod_base = OTHER; note = 2-fluororibose guanine
  modified_base 17: mod_base = um
  modified_base 18: mod_base = um
  modified_base 19: mod_base = cm
  modified_base 20: mod_base = cm
  modified_base 21: mod_base = um
  modified_base 21..22: mod_base = OTHER; note = phosphorothioate
  modified_base 22: mod_base = um
  modified_base 22..23: mod_base = OTHER; note = phosphorothioate
  modified_base 23: mod_base = um
  source 1..23: mol_type = other RNA
ttaatagccagtacagttccttt

SEQ ID NO: 854 - RNA, 23 nt, synthetic construct
  misc_feature 1..23: note = Synthetic: WV-43147
  misc_feature 1..23: note = Synthetic: SSR-0105115
  modified_base 1: mod_base = um
  modified_base 1..2: mod_base = OTHER; note = phosphorothioate
  modified_base 2: mod_base = OTHER; note = 2-fluororibose guanine
  modified_base 2..3: mod_base = OTHER; note = phosphorothioate
  modified_base 3: mod_base = um
  modified_base 4: mod_base = OTHER; note = 2-O-methylribose adenine
  modified_base 5: mod_base = OTHER; note = 2-O-methylribose adenine
  modified_base 6: mod_base = OTHER; note = 2-fluororibose uracil
  modified_base 7: mod_base = OTHER; note = 2-O-methylribose adenine
  modified_base 8: mod_base = gm
  modified_base 9: mod_base = cm
  modified_base 10: mod_base = cm
  modified_base 11: mod_base = OTHER; note = 2-O-methylribose adenine
  modified_base 12: mod_base = gm
  modified_base 13: mod_base = um
  modified_base 14: mod_base = OTHER; note = 2-fluororibose adenine
  modified_base 15: mod_base = cm
  modified_base 16: mod_base = OTHER; note = 2-fluororibose adenine
  modified_base 17: mod_base = gm
  modified_base 18: mod_base = um
  modified_base 19: mod_base = um
  modified_base 20: mod_base = cm
  modified_base 21: mod_base = cm
  modified_base 21..22: mod_base = OTHER; note = phosphorothioate
  modified_base 22: mod_base = um
  modified_base 22..23: mod_base = OTHER; note = phosphorothioate
  modified_base 23: mod_base = um
  source 1..23: mol_type = other RNA
tgtaatagccagtacagttcctt

SEQ ID NO: 855 - RNA, 23 nt, synthetic construct
  misc_feature 1..23: note = Synthetic: WV-43148
  misc_feature 1..23: note = Synthetic: SSR-0105080
  modified_base 1: mod_base = um
  modified_base 1..2: mod_base = OTHER; note = phosphorothioate
  modified_base 2: mod_base = OTHER; note = 2-fluororibose adenine
  modified_base 2..3: mod_base = OTHER; note = phosphorothioate
  modified_base 3: mod_base = gm
  modified_base 4: mod_base = um
  modified_base 5: mod_base = gm
  modified_base 6: mod_base = OTHER; note = 2-fluororibose guanine
  modified_base 7: mod_base = gm
  modified_base 8: mod_base = OTHER; note = 2-O-methylribose adenine
  modified_base 9: mod_base = gm
  modified_base 10: mod_base = um
  modified_base 11: mod_base = cm
  modified_base 12: mod_base = gm
  modified_base 13: mod_base = gm
  modified_base 14: mod_base = OTHER; note = 2-fluororibose adenine
  modified_base 15: mod_base = um
  modified_base 16: mod_base = OTHER; note = 2-fluororibose uracil
  modified_base 17: mod_base = OTHER; note = 2-O-methylribose adenine
  modified_base 18: mod_base = um
  modified_base 19: mod_base = um
  modified_base 20: mod_base = um
  modified_base 21: mod_base = um
  modified_base 21..22: mod_base = OTHER; note = phosphorothioate
  modified_base 22: mod_base = um
  modified_base 22..23: mod_base = OTHER; note = phosphorothioate
  modified_base 23: mod_base = um
  source 1..23: mol_type = other RNA
tagtgggagtcggattatttttt

SEQ ID NO: 856 - RNA, 23 nt, synthetic construct
  misc_feature 1..23: note = Synthetic: WV-43149
  misc_feature 1..23: note = Synthetic: SSR-0105109
  modified_base 1: mod_base = um
  modified_base 1..2: mod_base = OTHER; note = phosphorothioate
  modified_base 2: mod_base = OTHER; note = 2-fluororibose guanine
  modified_base 2..3: mod_base = OTHER; note = phosphorothioate
  modified_base 3: mod_base = OTHER; note = 2-O-methylribose adenine
  modified_base 4: mod_base = um
  modified_base 5: mod_base = gm
  modified_base 6: mod_base = OTHER; note = 2-fluororibose uracil
  modified_base 7: mod_base = OTHER; note = 2-O-methylribose adenine
  modified_base 8: mod_base = gm
  modified_base 9: mod_base = um
  modified_base 10: mod_base = gm
  modified_base 11: mod_base = gm
  modified_base 12: mod_base = gm
  modified_base 13: mod_base = OTHER; note = 2-O-methylribose adenine
  modified_base 14: mod_base = OTHER; note = 2-fluororibose guanine
  modified_base 15: mod_base = um
  modified_base 16: mod_base = OTHER; note = 2-fluororibose cytosine
  modified_base 17: mod_base = gm
  modified_base 18: mod_base = gm
  modified_base 19: mod_base = OTHER; note = 2-O-methylribose adenine
  modified_base 20: mod_base = um
  modified_base 21: mod_base = um
  modified_base 21..22: mod_base = OTHER; note = phosphorothioate
  modified_base 22: mod_base = um
  modified_base 22..23: mod_base = OTHER; note = phosphorothioate
  modified_base 23: mod_base = um
  source 1..23: mol_type = other RNA
tgatgtagtgggagtcggatttt

SEQ ID NO: 857 - RNA, 23 nt, synthetic construct
  misc_feature 1..23: note = Synthetic: WV-43150
  misc_feature 1..23: note = Synthetic: SSR-0105135
  modified_base 1: mod_base = um
  modified_base 1..2: mod_base = OTHER; note = phosphorothioate
  modified_base 2: mod_base = OTHER; note = 2-fluororibose uracil
  modified_base 2..3: mod_base = OTHER; note = phosphorothioate
  modified_base 3: mod_base = gm
  modified_base 4: mod_base = OTHER; note = 2-O-methylribose adenine
  modified_base 5: mod_base = um
  modified_base 6: mod_base = OTHER; note = 2-fluororibose guanine
  modified_base 7: mod_base = um
  modified_base 8: mod_base = OTHER; note = 2-O-methylribose adenine
  modified_base 9: mod_base = gm
  modified_base 10: mod_base = um
  modified_base 11: mod_base = gm
  modified_base 12: mod_base = gm
  modified_base 13: mod_base = gm
  modified_base 14: mod_base = OTHER; note = 2-fluororibose adenine
  modified_base 15: mod_base = gm
  modified_base 16: mod_base = OTHER; note = 2-fluororibose uracil
  modified_base 17: mod_base = cm
  modified_base 18: mod_base = gm
  modified_base 19: mod_base = gm
  modified_base 20: mod_base = OTHER; note = 2-O-methylribose adenine
  modified_base 21: mod_base = um
  modified_base 21..22: mod_base = OTHER; note = phosphorothioate
  modified_base 22: mod_base = um
  modified_base 22..23: mod_base = OTHER; note = phosphorothioate
  modified_base 23: mod_base = um
  source 1..23: mol_type = other RNA
ttgatgtagtgggagtcggattt

SEQ ID NO: 858 - RNA, 23 nt, synthetic construct
  misc_feature 1..23: note = Synthetic: WV-43151
  misc_feature 1..23: note = Synthetic: SSR-0105138
  modified_base 1: mod_base = um
  modified_base 1..2: mod_base = OTHER; note = phosphorothioate
  modified_base 2: mod_base = OTHER; note = 2-fluororibose uracil
  modified_base 2..3: mod_base = OTHER; note = phosphorothioate
  modified_base 3: mod_base = um
  modified_base 4: mod_base = OTHER; note = 2-O-methylribose adenine
  modified_base 5: mod_base = gm
  modified_base 6: mod_base = OTHER; note = 2-fluororibose uracil
  modified_base 7: mod_base = cm
  modified_base 8: mod_base = um
  modified_base 9: mod_base = um
  modified_base 10: mod_base = gm
  modified_base 11: mod_base = OTHER; note = 2-O-methylribose adenine
  modified_base 12: mod_base = um
  modified_base 13: mod_base = gm
  modified_base 14: mod_base = OTHER; note = 2-fluororibose uracil
  modified_base 15: mod_base = OTHER; note = 2-O-methylribose adenine
  modified_base 16: mod_base = OTHER; note = 2-fluororibose guanine
  modified_base 17: mod_base = um
  modified_base 18: mod_base = gm
  modified_base 19: mod_base = gm
  modified_base 20: mod_base = gm
  modified_base 21: mod_base = OTHER; note = 2-O-methylribose adenine
  modified_base 21..22: mod_base = OTHER; note = phosphorothioate
  modified_base 22: mod_base = um
  modified_base 22..23: mod_base = OTHER; note = phosphorothioate
  modified_base 23: mod_base = um
  source 1..23: mol_type = other RNA
tttagtcttgatgtagtgggatt

SEQ ID NO: 859 - RNA, 23 nt, synthetic construct
  misc_feature 1..23: note = Synthetic: WV-43152
  misc_feature 1..23: note = Synthetic: SSR-0105084
  modified_base 1: mod_base = um
  modified_base 1..2: mod_base = OTHER; note = phosphorothioate
  modified_base 2: mod_base = OTHER; note = 2-fluororibose adenine
  modified_base 2..3: mod_base = OTHER; note = phosphorothioate
  modified_base 3: mod_base = um
  modified_base 4: mod_base = um
  modified_base 5: mod_base = OTHER; note = 2-O-methylribose adenine
  modified_base 6: mod_base = OTHER; note = 2-fluororibose guanine
  modified_base 7: mod_base = um
  modified_base 8: mod_base = cm
  modified_base 9: mod_base = um
  modified_base 10: mod_base = um
  modified_base 11: mod_base = gm
  modified_base 12: mod_base = OTHER; note = 2-O-methylribose adenine
  modified_base 13: mod_base = um
  modified_base 14: mod_base = OTHER; note = 2-fluororibose guanine
  modified_base 15: mod_base = um
  modified_base 16: mod_base = OTHER; note = 2-fluororibose adenine
  modified_base 17: mod_base = gm
  modified_base 18: mod_base = um
  modified_base 19: mod_base = gm
  modified_base 20: mod_base = gm
  modified_base 21: mod_base = gm
  modified_base 21..22: mod_base = OTHER; note = phosphorothioate
  modified_base 22: mod_base = um
  modified_base 22..23: mod_base = OTHER; note = phosphorothioate
  modified_base 23: mod_base = um
  source 1..23: mol_type = other RNA
tattagtcttgatgtagtgggtt

SEQ ID NO: 860 - RNA, 23 nt, synthetic construct
  misc_feature 1..23: note = Synthetic: WV-43153
  misc_feature 1..23: note = Synthetic: SSR-0105111
  modified_base 1: mod_base = um
  modified_base 1..2: mod_base = OTHER; note = phosphorothioate
  modified_base 2: mod_base = OTHER; note = 2-fluororibose guanine
  modified_base 2..3: mod_base = OTHER; note = phosphorothioate
  modified_base 3: mod_base = OTHER; note = 2-O-methylribose adenine
  modified_base 4: mod_base = um
  modified_base 5: mod_base = um
  modified_base 6: mod_base = OTHER; note = 2-fluororibose adenine
  modified_base 7: mod_base = gm
  modified_base 8: mod_base = um
  modified_base 9: mod_base = cm
  modified_base 10: mod_base = um
  modified_base 11: mod_base = um
  modified_base 12: mod_base = gm
  modified_base 13: mod_base = OTHER; note = 2-O-methylribose adenine
  modified_base 14: mod_base = OTHER; note = 2-fluororibose uracil
  modified_base 15: mod_base = gm
  modified_base 16: mod_base = OTHER; note = 2-fluororibose uracil
  modified_base 17: mod_base = OTHER; note = 2-O-methylribose adenine
  modified_base 18: mod_base = gm
  modified_base 19: mod_base = um
  modified_base 20: mod_base = gm
  modified_base 21: mod_base = gm
  modified_base 21..22: mod_base = OTHER; note = phosphorothioate
  modified_base 22: mod_base = um
  modified_base 22..23: mod_base = OTHER; note = phosphorothioate
  modified_base 23: mod_base = um
  source 1..23: mol_type = other RNA
tgattagtcttgatgtagtggtt

SEQ ID NO: 861 - RNA, 23 nt, synthetic construct
  misc_feature 1..23: note = Synthetic: WV-43154
  misc_feature 1..23: note = Synthetic: SSR-0105072
  modified_base 1: mod_base = um
  modified_base 1..2: mod_base = OTHER; note = phosphorothioate
  modified_base 2: mod_base = OTHER; note = 2-fluororibose adenine
  modified_base 2..3: mod_base = OTHER; note = phosphorothioate
  modified_base 3: mod_base = gm
  modified_base 4: mod_base = OTHER; note = 2-O-methylribose adenine
  modified_base 5: mod_base = um
  modified_base 6: mod_base = OTHER; note = 2-fluororibose uracil
  modified_base 7: mod_base = OTHER; note = 2-O-methylribose adenine
  modified_base 8: mod_base = gm
  modified_base 9: mod_base = um
  modified_base 10: mod_base = cm
  modified_base 11: mod_base = um
  modified_base 12: mod_base = um
  modified_base 13: mod_base = gm
  modified_base 14: mod_base = OTHER; note = 2-fluororibose adenine
  modified_base 15: mod_base = um
  modified_base 16: mod_base = OTHER; note = 2-fluororibose guanine
  modified_base 17: mod_base = um
  modified_base 18: mod_base = OTHER; note = 2-O-methylribose adenine
  modified_base 19: mod_base = gm
  modified_base 20: mod_base = um
  modified_base 21: mod_base = gm
  modified_base 21..22: mod_base = OTHER; note = phosphorothioate
  modified_base 22: mod_base = um
  modified_base 22..23: mod_base = OTHER; note = phosphorothioate
  modified_base 23: mod_base = um
  source 1..23: mol_type = other RNA
tagattagtcttgatgtagtgtt

SEQ ID NO: 862 - RNA, 23 nt, synthetic construct
  misc_feature 1..23: note = Synthetic: WV-43155
  misc_feature 1..23: note = Synthetic: SSR-0105089
  modified_base 1: mod_base = um
  modified_base 1..2: mod_base = OTHER; note = phosphorothioate
  modified_base 2: mod_base = OTHER; note = 2-fluororibose cytosine
  modified_base 2..3: mod_base = OTHER; note = phosphorothioate
  modified_base 3: mod_base = OTHER; note = 2-O-methylribose adenine
  modified_base 4: mod_base = OTHER; note = 2-O-methylribose adenine
  modified_base 5: mod_base = gm
  modified_base 6: mod_base = OTHER; note = 2-fluororibose adenine
  modified_base 7: mod_base = um
  modified_base 8: mod_base = um
  modified_base 9: mod_base = OTHER; note = 2-O-methylribose adenine
  modified_base 10: mod_base = gm
  modified_base 11: mod_base = um
  modified_base 12: mod_base = cm
  modified_base 13: mod_base = um
  modified_base 14: mod_base = OTHER; note = 2-fluororibose uracil
  modified_base 15: mod_base = gm
  modified_base 16: mod_base = OTHER; note = 2-fluororibose adenine
  modified_base 17: mod_base = um
  modified_base 18: mod_base = gm
  modified_base 19: mod_base = um
  modified_base 20: mod_base = OTHER; note = 2-O-methylribose adenine
  modified_base 21: mod_base = gm
  modified_base 21..22: mod_base = OTHER; note = phosphorothioate
  modified_base 22: mod_base = um
  modified_base 22..23: mod_base = OTHER; note = phosphorothioate
  modified_base 23: mod_base = um
  source 1..23: mol_type = other RNA
tcaagattagtcttgatgtagtt

SEQ ID NO: 863 - RNA, 23 nt, synthetic construct
  misc_feature 1..23: note = Synthetic: WV-43156
  misc_feature 1..23: note = Synthetic: SSR-0105066
  modified_base 1: mod_base = um
  modified_base 1..2: mod_base = OTHER; note = phosphorothioate
  modified_base 2: mod_base = OTHER; note = 2-fluororibose adenine
  modified_base 2..3: mod_base = OTHER; note = phosphorothioate
  modified_base 3: mod_base = cm
  modified_base 4: mod_base = OTHER; note = 2-O-methylribose adenine
  modified_base 5: mod_base = um
  modified_base 6: mod_base = OTHER; note = 2-fluororibose guanine
  modified_base 7: mod_base = um
  modified_base 8: mod_base = gm
  modified_base 9: mod_base = OTHER; note = 2-O-methylribose adenine
  modified_base 10: mod_base = OTHER; note = 2-O-methylribose adenine
  modified_base 11: mod_base = OTHER; note = 2-O-methylribose adenine
  modified_base 12: mod_base = OTHER; note = 2-O-methylribose adenine
  modified_base 13: mod_base = OTHER; note = 2-O-methylribose adenine
  modified_base 14: mod_base = OTHER; note = 2-fluororibose cytosine
  modified_base 15: mod_base = OTHER; note = 2-O-methylribose adenine
  modified_base 16: mod_base = OTHER; note = 2-fluororibose cytosine
  modified_base 17: mod_base = OTHER; note = 2-O-methylribose adenine
  modified_base 18: mod_base = cm
  modified_base 19: mod_base = OTHER; note = 2-O-methylribose adenine
  modified_base 20: mod_base = OTHER; note = 2-O-methylribose adenine
  modified_base 21: mod_base = OTHER; note = 2-O-methylribose adenine
  modified_base 21..22: mod_base = OTHER; note = phosphorothioate
  modified_base 22: mod_base = um
  modified_base 22..23: mod_base = OTHER; note = phosphorothioate
  modified_base 23: mod_base = um
  source 1..23: mol_type = other RNA
tacatgtgaaaaacacacaaatt

SEQ ID NO: 864 - RNA, 23 nt, synthetic construct
  misc_feature 1..23: note = Synthetic: WV-43157
  misc_feature 1..23: note = Synthetic: SSR-0105062
  modified_base 1: mod_base = um
  modified_base 1..2: mod_base = OTHER; note = phosphorothioate
  modified_base 2: mod_base = OTHER; note = 2-fluororibose adenine
  modified_base 2..3: mod_base = OTHER; note = phosphorothioate
  modified_base 3: mod_base = OTHER; note = 2-O-methylribose adenine
  modified_base 4: mod_base = um
  modified_base 5: mod_base = OTHER; note = 2-O-methylribose adenine
  modified_base 6: mod_base = OTHER; note = 2-fluororibose cytosine
  modified_base 7: mod_base = OTHER; note = 2-O-methylribose adenine
  modified_base 8: mod_base = um
  modified_base 9: mod_base = gm
  modified_base 10: mod_base = um
  modified_base 11: mod_base = gm
  modified_base 12: mod_base = OTHER; note = 2-O-methylribose adenine
  modified_base 13: mod_base = OTHER; note = 2-O-methylribose adenine
  modified_base 14: mod_base = OTHER; note = 2-fluororibose adenine
  modified_base 15: mod_base = OTHER; note = 2-O-methylribose adenine
  modified_base 16: mod_base = OTHER; note = 2-fluororibose adenine
  modified_base 17: mod_base = cm
  modified_base 18: mod_base = OTHER; note = 2-O-methylribose adenine
  modified_base 19: mod_base = cm
  modified_base 20: mod_base = OTHER; note = 2-O-methylribose adenine
  modified_base 21: mod_base = cm
  modified_base 21..22: mod_base = OTHER; note = phosphorothioate
  modified_base 22: mod_base = um
  modified_base 22..23: mod_base = OTHER; note = phosphorothioate
  modified_base 23: mod_base = um
  source 1..23: mol_type = other RNA
taatacatgtgaaaaacacactt

SEQ ID NO: 865 - RNA, 23 nt, synthetic construct
  misc_feature 1..23: note = Synthetic: WV-43158
  misc_feature 1..23: note = Synthetic: SSR-0105095
  modified_base 1: mod_base = um
  modified_base 1..2: mod_base = OTHER; note = phosphorothioate
  modified_base 2: mod_base = OTHER; note = 2-fluororibose cytosine
  modified_base 2..3: mod_base = OTHER; note = phosphorothioate
  modified_base 3: mod_base = um
  modified_base 4: mod_base = OTHER; note = 2-O-methylribose adenine
  modified_base 5: mod_base = um
  modified_base 6: mod_base = OTHER; note = 2-fluororibose adenine
  modified_base 7: mod_base = OTHER; note = 2-O-methylribose adenine
  modified_base 8: mod_base = um
  modified_base 9: mod_base = OTHER; note = 2-O-methylribose adenine
  modified_base 10: mod_base = cm
  modified_base 11: mod_base = OTHER; note = 2-O-methylribose adenine
  modified_base 12: mod_base = um
  modified_base 13: mod_base = gm
  modified_base 14: mod_base = OTHER; note = 2-fluororibose uracil
  modified_base 15: mod_base = gm
  modified_base 16: mod_base = OTHER; note = 2-fluororibose adenine
  modified_base 17: mod_base = OTHER; note = 2-O-methylribose adenine
  modified_base 18: mod_base = OTHER; note = 2-O-methylribose adenine
  modified_base 19: mod_base = OTHER; note = 2-O-methylribose adenine
  modified_base 20: mod_base = OTHER; note = 2-O-methylribose adenine
  modified_base 21: mod_base = cm
  modified_base 21..22: mod_base = OTHER; note = phosphorothioate
  modified_base 22: mod_base = um
  modified_base 22..23: mod_base = OTHER; note = phosphorothioate
  modified_base 23: mod_base = um
  source 1..23: mol_type = other RNA
tctataatacatgtgaaaaactt

SEQ ID NO: 866 - RNA, 23 nt, synthetic construct
  misc_feature 1..23: note = Synthetic: WV-43159
  misc_feature 1..23: note = Synthetic: SSR-0105094
  modified_base 1: mod_base = um
  modified_base 1..2: mod_base = OTHER; note = phosphorothioate
  modified_base 2: mod_base = OTHER; note = 2-fluororibose cytosine
  modified_base 2..3: mod_base = OTHER; note = phosphorothioate
  modified_base 3: mod_base = cm
  modified_base 4: mod_base = OTHER; note = 2-O-methylribose adenine
  modified_base 5: mod_base = um
  modified_base 6: mod_base = OTHER; note = 2-fluororibose guanine
  modified_base 7: mod_base = cm
  modified_base 8: mod_base = OTHER; note = 2-O-methylribose adenine
  modified_base 9: mod_base = OTHER; note = 2-O-methylribose adenine
  modified_base 10: mod_base = OTHER; note = 2-O-methylribose adenine
  modified_base 11: mod_base = OTHER; note = 2-O-methylribose adenine
  modified_base 12: mod_base = gm
  modified_base 13: mod_base = cm
  modified_base 14: mod_base = OTHER; note = 2-fluororibose adenine
  modified_base 15: mod_base = um
  modified_base 16: mod_base = OTHER; note = 2-fluororibose uracil
  modified_base 17: mod_base = cm
  modified_base 18: mod_base = um
  modified_base 19: mod_base = OTHER; note = 2-O-methylribose adenine
  modified_base 20: mod_base = um
  modified_base 21: mod_base = OTHER; note = 2-O-methylribose adenine
  modified_base 21..22: mod_base = OTHER; note = phosphorothioate
  modified_base 22: mod_base = um
  modified_base 22..23: mod_base = OTHER; note = phosphorothioate
  modified_base 23: mod_base = um
  source 1..23: mol_type = other RNA
tccatgcaaaagcattctatatt

SEQ ID NO: 867 - RNA, 23 nt, synthetic construct
  misc_feature 1..23: note = Synthetic: WV-43160
  misc_feature 1..23: note = Synthetic: SSR-0105132
  modified_base 1: mod_base = um
  modified_base 1..2: mod_base = OTHER; note = phosphorothioate
  modified_base 2: mod_base = OTHER; note = 2-fluororibose uracil
  modified_base 2..3: mod_base = OTHER; note = phosphorothioate
  modified_base 3: mod_base = cm
  modified_base 4: mod_base = cm
  modified_base 5: mod_base = OTHER; note = 2-O-methylribose adenine
  modified_base 6: mod_base = OTHER; note = 2-fluororibose uracil
  modified_base 7: mod_base = gm
  modified_base 8: mod_base = cm
  modified_base 9: mod_base = OTHER; note = 2-O-methylribose adenine
  modified_base 10: mod_base = OTHER; note = 2-O-methylribose adenine
  modified_base 11: mod_base = OTHER; note = 2-O-methylribose adenine
  modified_base 12: mod_base = OTHER; note = 2-O-methylribose adenine
  modified_base 13: mod_base = gm
  modified_base 14: mod_base = OTHER; note = 2-fluororibose cytosine
  modified_base 15: mod_base = OTHER; note = 2-O-methylribose adenine
  modified_base 16: mod_base = OTHER; note = 2-fluororibose uracil
  modified_base 17: mod_base = um
  modified_base 18: mod_base = cm
  modified_base 19: mod_base = um
  modified_base 20: mod_base = OTHER; note = 2-O-methylribose adenine
  modified_base 21: mod_base = um
  modified_base 21..22: mod_base = OTHER; note = phosphorothioate
  modified_base 22: mod_base = um
  modified_base 22..23: mod_base = OTHER; note = phosphorothioate
  modified_base 23: mod_base = um
  source 1..23: mol_type = other RNA
ttccatgcaaaagcattctattt

SEQ ID NO: 868 - RNA, 23 nt, synthetic construct
  misc_feature 1..23: note = Synthetic: WV-43161
  misc_feature 1..23: note = Synthetic: SSR-0105118
  modified_base 1: mod_base = um
  modified_base 1..2: mod_base = OTHER; note = phosphorothioate
  modified_base 2: mod_base = OTHER; note = 2-fluororibose guanine
  modified_base 2..3: mod_base = OTHER; note = phosphorothioate
  modified_base 3: mod_base = um
  modified_base 4: mod_base = cm
  modified_base 5: mod_base = cm
  modified_base 6: mod_base = OTHER; note = 2-fluororibose adenine
  modified_base 7: mod_base = um
  modified_base 8: mod_base = gm
  modified_base 9: mod_base = cm
  modified_base 10: mod_base = OTHER; note = 2-O-methylribose adenine
  modified_base 11: mod_base = OTHER; note = 2-O-methylribose adenine
  modified_base 12: mod_base = OTHER; note = 2-O-methylribose adenine
  modified_base 13: mod_base = OTHER; note = 2-O-methylribose adenine
  modified_base 14: mod_base = OTHER; note = 2-fluororibose guanine
  modified_base 15: mod_base = cm
  modified_base 16: mod_base = OTHER; note = 2-fluororibose adenine
  modified_base 17: mod_base = um
  modified_base 18: mod_base = um
  modified_base 19: mod_base = cm
  modified_base 20: mod_base = um
  modified_base 21: mod_base = OTHER; note = 2-O-methylribose adenine
  modified_base 21..22: mod_base = OTHER; note = phosphorothioate
  modified_base 22: mod_base = um
  modified_base 22..23: mod_base = OTHER; note = phosphorothioate
  modified_base 23: mod_base = um
  source 1..23: mol_type = other RNA
tgtccatgcaaaagcattctatt

SEQ ID NO: 869 - RNA, 23 nt, synthetic construct
  misc_feature 1..23: note = Synthetic: WV-43162
  misc_feature 1..23: note = Synthetic: SSR-0105079
  modified_base 1: mod_base = um
  modified_base 1..2: mod_base = OTHER; note = phosphorothioate
  modified_base 2: mod_base = OTHER; note = 2-fluororibose adenine
  modified_base 2..3: mod_base = OTHER; note = phosphorothioate
  modified_base 3: mod_base = gm
  modified_base 4: mod_base = um
  modified_base 5: mod_base = cm
  modified_base 6: mod_base = OTHER; note = 2-fluororibose cytosine
  modified_base 7: mod_base = OTHER; note = 2-O-methylribose adenine
  modified_base 8: mod_base = um
  modified_base 9: mod_base = gm
  modified_base 10: mod_base = cm
  modified_base 11: mod_base = OTHER; note = 2-O-methylribose adenine
  modified_base 12: mod_base = OTHER; note = 2-O-methylribose adenine
  modified_base 13: mod_base = OTHER; note = 2-O-methylribose adenine
  modified_base 14: mod_base = OTHER; note = 2-fluororibose adenine
  modified_base 15: mod_base = gm
  modified_base 16: mod_base = OTHER; note = 2-fluororibose cytosine
  modified_base 17: mod_base = OTHER; note = 2-O-methylribose adenine
  modified_base 18: mod_base = um
  modified_base 19: mod_base = um
  modified_base 20: mod_base = cm
  modified_base 21: mod_base = um
  modified_base 21..22: mod_base = OTHER; note = phosphorothioate
  modified_base 22: mod_base = um
  modified_base 22..23: mod_base = OTHER; note = phosphorothioate
  modified_base 23: mod_base = um
  source 1..23: mol_type = other RNA
tagtccatgcaaaagcattcttt

SEQ ID NO: 870 - RNA, 23 nt, synthetic construct
  misc_feature 1..23: note = Synthetic: WV-43163
  misc_feature 1..23: note = Synthetic: SSR-0105127
  modified_base 1: mod_base = um
  modified_base 1..2: mod_base = OTHER; note = phosphorothioate
  modified_base 2: mod_base = OTHER; note = 2-fluororibose uracil
  modified_base 2..3: mod_base = OTHER; note = phosphorothioate
  modified_base 3: mod_base = OTHER; note = 2-O-methylribose adenine
  modified_base 4: mod_base = gm
  modified_base 5: mod_base = um
  modified_base 6: mod_base = OTHER; note = 2-fluororibose cytosine
  modified_base 7: mod_base = cm
  modified_base 8: mod_base = OTHER; note = 2-O-methylribose adenine
  modified_base 9: mod_base = um
  modified_base 10: mod_base = gm
  modified_base 11: mod_base = cm
  modified_base 12: mod_base = OTHER; note = 2-O-methylribose adenine
  modified_base 13: mod_base = OTHER; note = 2-O-methylribose adenine
  modified_base 14: mod_base = OTHER; note = 2-fluororibose adenine
  modified_base 15: mod_base = OTHER; note = 2-O-methylribose adenine
  modified_base 16: mod_base = OTHER; note = 2-fluororibose guanine
  modified_base 17: mod_base = cm
  modified_base 18: mod_base = OTHER; note = 2-O-methylribose adenine
  modified_base 19: mod_base = um
  modified_base 20: mod_base = um
  modified_base 21: mod_base = cm
  modified_base 21..22: mod_base = OTHER; note = phosphorothioate
  modified_base 22: mod_base = um
  modified_base 22..23: mod_base = OTHER; note = phosphorothioate
  modified_base 23: mod_base = um
  source 1..23: mol_type = other RNA
ttagtccatgcaaaagcattctt

SEQ ID NO: 871 - RNA, 23 nt, synthetic construct
  misc_feature 1..23: note = Synthetic: WV-43164
  misc_feature 1..23: note = Synthetic: SSR-0105107
  modified_base 1: mod_base = um
  modified_base 1..2: mod_base = OTHER; note = phosphorothioate
  modified_base 2: mod_base = OTHER; note = 2-fluororibose guanine
  modified_base 2..3: mod_base = OTHER; note = phosphorothioate
  modified_base 3: mod_base = OTHER; note = 2-O-methylribose adenine
  modified_base 4: mod_base = um
  modified_base 5: mod_base = OTHER; note = 2-O-methylribose adenine
  modified_base 6: mod_base = OTHER; note = 2-fluororibose guanine
  modified_base 7: mod_base = um
  modified_base 8: mod_base = cm
  modified_base 9: mod_base = cm
  modified_base 10: mod_base = OTHER; note = 2-O-methylribose adenine
  modified_base 11: mod_base = um
  modified_base 12: mod_base = gm
  modified_base 13: mod_base = cm
  modified_base 14: mod_base = OTHER; note = 2-fluororibose adenine
  modified_base 15: mod_base = OTHER; note = 2-O-methylribose adenine
  modified_base 16: mod_base = OTHER; note = 2-fluororibose adenine
  modified_base 17: mod_base = OTHER; note = 2-O-methylribose adenine
  modified_base 18: mod_base = gm
  modified_base 19: mod_base = cm
  modified_base 20: mod_base = OTHER; note = 2-O-methylribose adenine
  modified_base 21: mod_base = um
  modified_base 21..22: mod_base = OTHER; note = phosphorothioate
  modified_base 22: mod_base = um
  modified_base 22..23: mod_base = OTHER; note = phosphorothioate
  modified_base 23: mod_base = um
  source 1..23: mol_type = other RNA
tgatagtccatgcaaaagcattt

SEQ ID NO: 872 - RNA, 23 nt, synthetic construct
  misc_feature 1..23: note = Synthetic: WV-43165
  misc_feature 1..23: note = Synthetic: SSR-0105112
  modified_base 1: mod_base = um
  modified_base 1..2: mod_base = OTHER; note = phosphorothioate
  modified_base 2: mod_base = OTHER; note = 2-fluororibose guanine
  modified_base 2..3: mod_base = OTHER; note = phosphorothioate
  modified_base 3: mod_base = gm
  modified_base 4: mod_base = OTHER; note = 2-O-methylribose adenine
  modified_base 5: mod_base = um
  modified_base 6: mod_base = OTHER; note = 2-fluororibose adenine
  modified_base 7: mod_base = gm
  modified_base 8: mod_base = um
  modified_base 9: mod_base = cm
  modified_base 10: mod_base = cm
  modified_base 11: mod_base = OTHER; note = 2-O-methylribose adenine
  modified_base 12: mod_base = um
  modified_base 13: mod_base = gm
  modified_base 14: mod_base = OTHER; note = 2-fluororibose cytosine
  modified_base 15: mod_base = OTHER; note = 2-O-methylribose adenine
  modified_base 16: mod_base = OTHER; note = 2-fluororibose adenine
  modified_base 17: mod_base = OTHER; note = 2-O-methylribose adenine
  modified_base 18: mod_base = OTHER; note = 2-O-methylribose adenine
  modified_base 19: mod_base = gm
  modified_base 20: mod_base = cm
  modified_base 21: mod_base = OTHER; note = 2-O-methylribose adenine
  modified_base 21..22: mod_base = OTHER; note = phosphorothioate
  modified_base 22: mod_base = um
  modified_base 22..23: mod_base = OTHER; note = phosphorothioate
  modified_base 23: mod_base = um
  source 1..23: mol_type = other RNA
tggatagtccatgcaaaagcatt

SEQ ID NO: 873 - RNA, 23 nt, synthetic construct
  misc_feature 1..23: note = Synthetic: WV-43166
  misc_feature 1..23: note = Synthetic: SSR-0105067
  modified_base 1: mod_base = um
  modified_base 1..2: mod_base = OTHER; note = phosphorothioate
  modified_base 2: mod_base = OTHER; note = 2-fluororibose adenine
  modified_base 2..3: mod_base = OTHER; note = phosphorothioate
  modified_base 3: mod_base = gm
  modified_base 4: mod_base = OTHER; note = 2-O-methylribose adenine
  modified_base 5: mod_base = gm
  modified_base 6: mod_base = OTHER; note = 2-fluororibose guanine
  modified_base 7: mod_base = OTHER; note = 2-O-methylribose adenine
  modified_base 8: mod_base = um
  modified_base 9: mod_base = OTHER; note = 2-O-methylribose adenine
  modified_base 10: mod_base = gm
  modified_base 11: mod_base = um
  modified_base 12: mod_base = cm
  modified_base 13: mod_base = cm
  modified_base 14: mod_base = OTHER; note = 2-fluororibose adenine
  modified_base 15: mod_base = um
  modified_base 16: mod_base = OTHER; note = 2-fluororibose guanine
  modified_base 17: mod_base = cm
  modified_base 18: mod_base = OTHER; note = 2-O-methylribose adenine
  modified_base 19: mod_base = OTHER; note = 2-O-methylribose adenine
  modified_base 20: mod_base = OTHER; note = 2-O-methylribose adenine
  modified_base 21: mod_base = OTHER; note = 2-O-methylribose adenine
  modified_base 21..22: mod_base = OTHER; note = phosphorothioate
  modified_base 22: mod_base = um
  modified_base 22..23: mod_base = OTHER; note = phosphorothioate
  modified_base 23: mod_base = um
  source 1..23: mol_type = other RNA
tagaggatagtccatgcaaaatt

SEQ ID NO: 874 - RNA, 23 nt, synthetic construct
  misc_feature 1..23: note = Synthetic: WV-43167
  misc_feature 1..23: note = Synthetic: SSR-0105058
  modified_base 1: mod_base = um
  modified_base 1..2: mod_base = OTHER; note = phosphorothioate
  modified_base 2: mod_base = OTHER; note = 2-fluororibose adenine
  modified_base 2..3: mod_base = OTHER; note = phosphorothioate
  modified_base 3: mod_base = OTHER; note = 2-O-methylribose adenine
  modified_base 4: mod_base = gm
  modified_base 5: mod_base = OTHER; note = 2-O-methylribose adenine
  modified_base 6: mod_base = OTHER; note = 2-fluororibose guanine
  modified_base 7: mod_base = gm
  modified_base 8: mod_base = OTHER; note = 2-O-methylribose adenine
  modified_base 9: mod_base = um
  modified_base 10: mod_base = OTHER; note = 2-O-methylribose adenine
  modified_base 11: mod_base = gm
  modified_base 12: mod_base = um
  modified_base 13: mod_base = cm
  modified_base 14: mod_base = OTHER; note = 2-fluororibose cytosine
  modified_base 15: mod_base = OTHER; note = 2-O-methylribose adenine
  modified_base 16: mod_base = OTHER; note = 2-fluororibose uracil
  modified_base 17: mod_base = gm
  modified_base 18: mod_base = cm
  modified_base 19: mod_base = OTHER; note = 2-O-methylribose adenine
  modified_base 20: mod_base = OTHER; note = 2-O-methylribose adenine
  modified_base 21: mod_base = OTHER; note = 2-O-methylribose adenine
  modified_base 21..22: mod_base = OTHER; note = phosphorothioate
  modified_base 22: mod_base = um
  modified_base 22..23: mod_base = OTHER; note = phosphorothioate
  modified_base 23: mod_base = um
  source 1..23: mol_type = other RNA
taagaggatagtccatgcaaatt

SEQ ID NO: 875 - RNA, 23 nt, synthetic construct
  misc_feature 1..23: note = Synthetic: WV-43168
  misc_feature 1..23: note = Synthetic: SSR-0105088
  modified_base 1: mod_base = um
  modified_base 1..2: mod_base = OTHER; note = phosphorothioate
  modified_base 2: mod_base = OTHER; note = 2-fluororibose cytosine
  modified_base 2..3: mod_base = OTHER; note = phosphorothioate
  modified_base 3: mod_base = OTHER; note = 2-O-methylribose adenine
  modified_base 4: mod_base = OTHER; note = 2-O-methylribose adenine
  modified_base 5: mod_base = gm
  modified_base 6: mod_base = OTHER; note = 2-fluororibose adenine
  modified_base 7: mod_base = gm
  modified_base 8: mod_base = gm
  modified_base 9: mod_base = OTHER; note = 2-O-methylribose adenine
  modified_base 10: mod_base = um
  modified_base 11: mod_base = OTHER; note = 2-O-methylribose adenine
  modified_base 12: mod_base = gm
  modified_base 13: mod_base = um
  modified_base 14: mod_base = OTHER; note = 2-fluororibose cytosine
  modified_base 15: mod_base = cm
  modified_base 16: mod_base = OTHER; note = 2-fluororibose adenine
  modified_base 17: mod_base = um
  modified_base 18: mod_base = gm
  modified_base 19: mod_base = cm
  modified_base 20: mod_base = OTHER; note = 2-O-methylribose adenine
  modified_base 21: mod_base = OTHER; note = 2-O-methylribose adenine
  modified_base 21..22: mod_base = OTHER; note = phosphorothioate
  modified_base 22: mod_base = um
  modified_base 22..23: mod_base = OTHER; note = phosphorothioate
  modified_base 23: mod_base = um
  source 1..23: mol_type = other RNA
tcaagaggatagtccatgcaatt

SEQ ID NO: 876 - RNA, 23 nt, synthetic construct
  misc_feature 1..23: note = Synthetic: WV-43169
  misc_feature 1..23: note = Synthetic: SSR-0105057
  modified_base 1: mod_base = um
  modified_base 1..2: mod_base = OTHER; note = phosphorothioate
  modified_base 2: mod_base = OTHER; note = 2-fluororibose adenine
  modified_base 2..3: mod_base = OTHER; note = phosphorothioate
  modified_base 3: mod_base = OTHER; note = 2-O-methylribose adenine
  modified_base 4: mod_base = cm
  modified_base 5: mod_base = OTHER; note = 2-O-methylribose adenine
  modified_base 6: mod_base = OTHER; note = 2-fluororibose adenine
  modified_base 7: mod_base = gm
  modified_base 8: mod_base = OTHER; note = 2-O-methylribose adenine
  modified_base 9: mod_base = gm
  modified_base 10: mod_base = gm
  modified_base 11: mod_base = OTHER; note = 2-O-methylribose adenine
  modified_base 12: mod_base = um
  modified_base 13: mod_base = OTHER; note = 2-O-methylribose adenine
  modified_base 14: mod_base = OTHER; note = 2-fluororibose guanine
  modified_base 15: mod_base = um
  modified_base 16: mod_base = OTHER; note = 2-fluororibose cytosine
  modified_base 17: mod_base = cm
  modified_base 18: mod_base = OTHER; note = 2-O-methylribose adenine
  modified_base 19: mod_base = um
  modified_base 20: mod_base = gm
  modified_base 21: mod_base = cm
  modified_base 21..22: mod_base = OTHER; note = phosphorothioate
  modified_base 22: mod_base = um
  modified_base 22..23: mod_base = OTHER; note = phosphorothioate
  modified_base 23: mod_base = um
  source 1..23: mol_type = other RNA
taacaagaggatagtccatgctt

SEQ ID NO: 877 - RNA, 23 nt, synthetic construct
  misc_feature 1..23: note = Synthetic: WV-43170
  misc_feature 1..23: note = Synthetic: SSR-0105056
  modified_base 1: mod_base = um
  modified_base 1..2: mod_base = OTHER; note = phosphorothioate
  modified_base 2: mod_base = OTHER; note = 2-fluororibose adenine
  modified_base 2..3: mod_base = OTHER; note = phosphorothioate
  modified_base 3: mod_base = OTHER; note = 2-O-methylribose adenine
  modified_base 4: mod_base = OTHER; note = 2-O-methylribose adenine
  modified_base 5: mod_base = cm
  modified_base 6: mod_base = OTHER; note = 2-fluororibose adenine
  modified_base 7: mod_base = OTHER; note = 2-O-methylribose adenine
  modified_base 8: mod_base = gm
  modified_base 9: mod_base = OTHER; note = 2-O-methylribose adenine
  modified_base 10: mod_base = gm
  modified_base 11: mod_base = gm
  modified_base 12: mod_base = OTHER; note = 2-O-methylribose adenine
  modified_base 13: mod_base = um
  modified_base 14: mod_base = OTHER; note = 2-fluororibose adenine
  modified_base 15: mod_base = gm
  modified_base 16: mod_base = OTHER; note = 2-fluororibose uracil
  modified_base 17: mod_base = cm
  modified_base 18: mod_base = cm
  modified_base 19: mod_base = OTHER; note = 2-O-methylribose adenine
  modified_base 20: mod_base = um
  modified_base 21: mod_base = gm
  modified_base 21..22: mod_base = OTHER; note = phosphorothioate
  modified_base 22: mod_base = um
  modified_base 22..23: mod_base = OTHER; note = phosphorothioate
  modified_base 23: mod_base = um
  source 1..23: mol_type = other RNA
taaacaagaggatagtccatgtt

SEQ ID NO: 878 - RNA, 23 nt, synthetic construct
  misc_feature 1..23: note = Synthetic: WV-43171
  misc_feature 1..23: note = Synthetic: SSR-0105124
  modified_base 1: mod_base = um
  modified_base 1..2: mod_base = OTHER; note = phosphorothioate
  modified_base 2: mod_base = OTHER; note = 2-fluororibose uracil
  modified_base 2..3: mod_base = OTHER; note = phosphorothioate
  modified_base 3: mod_base = OTHER; note = 2-O-methylribose adenine
  modified_base 4: mod_base = OTHER; note = 2-O-methylribose adenine
  modified_base 5: mod_base = um
  modified_base 6: mod_base = OTHER; note = 2-fluororibose adenine
  modified_base 7: mod_base = OTHER; note = 2-O-methylribose adenine
  modified_base 8: mod_base = OTHER; note = 2-O-methylribose adenine
  modified_base 9: mod_base = OTHER; note = 2-O-methylribose adenine
  modified_base 10: mod_base = OTHER; note = 2-O-methylribose adenine
  modified_base 11: mod_base = cm
  modified_base 12: mod_base = OTHER; note = 2-O-methylribose adenine
  modified_base 13: mod_base = OTHER; note = 2-O-methylribose adenine
  modified_base 14: mod_base = OTHER; note = 2-fluororibose guanine
  modified_base 15: mod_base = OTHER; note = 2-O-methylribose adenine
  modified_base 16: mod_base = OTHER; note = 2-fluororibose guanine
  modified_base 17: mod_base = gm
  modified_base 18: mod_base = OTHER; note = 2-O-methylribose adenine
  modified_base 19: mod_base = um
  modified_base 20: mod_base = OTHER; note = 2-O-methylribose adenine
  modified_base 21: mod_base = gm
  modified_base 21..22: mod_base = OTHER; note = phosphorothioate
  modified_base 22: mod_base = um
  modified_base 22..23: mod_base = OTHER; note = phosphorothioate
  modified_base 23: mod_base = um
  source 1..23: mol_type = other RNA
ttaataaaaacaagaggatagtt

SEQ ID NO: 879 - RNA, 23 nt, synthetic construct
  misc_feature 1..23: note = Synthetic: WV-43172
  misc_feature 1..23: note = Synthetic: SSR-0105137
  modified_base 1: mod_base = um
  modified_base 1..2: mod_base = OTHER; note = phosphorothioate
  modified_base 2: mod_base = OTHER; note = 2-fluororibose uracil
  modified_base 2..3: mod_base = OTHER; note = phosphorothioate
  modified_base 3: mod_base = um
  modified_base 4: mod_base = OTHER; note = 2-O-methylribose adenine
  modified_base 5: mod_base = OTHER; note = 2-O-methylribose adenine
  modified_base 6: mod_base = OTHER; note = 2-fluororibose uracil
  modified_base 7: mod_base = OTHER; note = 2-O-methylribose adenine
  modified_base 8: mod_base = OTHER; note = 2-O-methylribose adenine
  modified_base 9: mod_base = OTHER; note = 2-O-methylribose adenine
  modified_base 10: mod_base = OTHER; note = 2-O-methylribose adenine
  modified_base 11: mod_base = OTHER; note = 2-O-methylribose adenine
  modified_base 12: mod_base = cm
  modified_base 13: mod_base = OTHER; note = 2-O-methylribose adenine
  modified_base 14: mod_base = OTHER; note = 2-fluororibose adenine
  modified_base 15: mod_base = gm
  modified_base 16: mod_base = OTHER; note = 2-fluororibose adenine
  modified_base 17: mod_base = gm
  modified_base 18: mod_base = gm
  modified_base 19: mod_base = OTHER; note = 2-O-methylribose adenine
  modified_base 20: mod_base = um
  modified_base 21: mod_base = OTHER; note = 2-O-methylribose adenine
  modified_base 21..22: mod_base = OTHER; note = phosphorothioate
  modified_base 22: mod_base = um
  modified_base 22..23: mod_base = OTHER; note = phosphorothioate
  modified_base 23: mod_base = um
  source 1..23: mol_type = other RNA
tttaataaaaacaagaggatatt

SEQ ID NO: 880 - RNA, 23 nt, synthetic construct
  misc_feature 1..23: note = Synthetic: WV-43173
  misc_feature 1..23: note = Synthetic: SSR-0105123
  modified_base 1: mod_base = um
  modified_base 1..2: mod_base = OTHER; note = phosphorothioate
  modified_base 2: mod_base = OTHER; note = 2-fluororibose uracil
  modified_base 2..3: mod_base = OTHER; note = phosphorothioate
  modified_base 3: mod_base = OTHER; note = 2-O-methylribose adenine
  modified_base 4: mod_base = OTHER; note = 2-O-methylribose adenine
  modified_base 5: mod_base = cm
  modified_base 6: mod_base = OTHER; note = 2-fluororibose uracil
  modified_base 7: mod_base = OTHER; note = 2-O-methylribose adenine
  modified_base 8: mod_base = cm
  modified_base 9: mod_base = OTHER; note = 2-O-methylribose adenine
  modified_base 10: mod_base = OTHER; note = 2-O-methylribose adenine
  modified_base 11: mod_base = gm
  modified_base 12: mod_base = OTHER; note = 2-O-methylribose adenine
  modified_base 13: mod_base = gm
  modified_base 14: mod_base = OTHER; note = 2-fluororibose guanine
  modified_base 15: mod_base = um
  modified_base 16: mod_base = OTHER; note = 2-fluororibose uracil
  modified_base 17: mod_base = OTHER; note = 2-O-methylribose adenine
  modified_base 18: mod_base = um
  modified_base 19: mod_base = um
  modified_base 20: mod_base = um
  modified_base 21: mod_base = um
  modified_base 21..22: mod_base = OTHER; note = phosphorothioate
  modified_base 22: mod_base = um
  modified_base 22..23: mod_base = OTHER; note = phosphorothioate
  modified_base 23: mod_base = um
  source 1..23: mol_type = other RNA
ttaactacaagaggttatttttt

SEQ ID NO: 881 - RNA, 23 nt, synthetic construct
  misc_feature 1..23: note = Synthetic: WV-43174
  misc_feature 1..23: note = Synthetic: SSR-0105139
  modified_base 1: mod_base = um
  modified_base 1..2: mod_base = OTHER; note = phosphorothioate
  modified_base 2: mod_base = OTHER; note = 2-fluororibose uracil
  modified_base 2..3: mod_base = OTHER; note = phosphorothioate
  modified_base 3: mod_base = um
  modified_base 4: mod_base = OTHER; note = 2-O-methylribose adenine
  modified_base 5: mod_base = um
  modified_base 6: mod_base = OTHER; note = 2-fluororibose adenine
  modified_base 7: mod_base = OTHER; note = 2-O-methylribose adenine
  modified_base 8: mod_base = cm
  modified_base 9: mod_base = um
  modified_base 10: mod_base = OTHER; note = 2-O-methylribose adenine
  modified_base 11: mod_base = cm
  modified_base 12: mod_base = OTHER; note = 2-O-methylribose adenine
  modified_base 13: mod_base = OTHER; note = 2-O-methylribose adenine
  modified_base 14: mod_base = OTHER; note = 2-fluororibose guanine
  modified_base 15: mod_base = OTHER; note = 2-O-methylribose adenine
  modified_base 16: mod_base = OTHER; note = 2-fluororibose guanine
  modified_base 17: mod_base = gm
  modified_base 18: mod_base = um
  modified_base 19: mod_base = um
  modified_base 20: mod_base = OTHER; note = 2-O-methylribose adenine
  modified_base 21: mod_base = um
  modified_base 21..22: mod_base = OTHER; note = phosphorothioate
  modified_base 22: mod_base = um
  modified_base 22..23: mod_base = OTHER; note = phosphorothioate
  modified_base 23: mod_base = um
  source 1..23: mol_type = other RNA
tttataactacaagaggttattt

SEQ ID NO: 882 - RNA, 21 nt, synthetic construct
  misc_feature 1..21: note = Synthetic: WV-43175
  misc_feature 1..21: note = Synthetic: SSR-0106394
  modified_base 1: mod_base = OTHER; note = mono GalNAc C5-amino-C6-pyrrolidine linked by phosphate to mono GalNAc C5-amino-C6-pyrrolidine linked by phosphate the 5' end of 2-O-methylribose adenine
  modified_base 1..2: mod_base = OTHER; note = phosphorothioate
  modified_base 2: mod_base = um
  modified_base 3: mod_base = gm
  modified_base 4: mod_base = um
  modified_base 5: mod_base = gm
  modified_base 6: mod_base = gm
  modified_base 7: mod_base = OTHER; note = 2-fluororibose uracil
  modified_base 8: mod_base = OTHER; note = 2-O-methylribose adenine
  modified_base 9: mod_base = OTHER; note = 2-fluororibose guanine
  modified_base 10: mod_base = OTHER; note = 2-fluororibose adenine
  modified_base 11: mod_base = OTHER; note = 2-fluororibose cytosine
  modified_base 12: mod_base = um
  modified_base 13: mod_base = gm
  modified_base 14: mod_base = cm
  modified_base 15: mod_base = OTHER; note = 2-O-methylribose adenine
  modified_base 16: mod_base = gm
  modified_base 17: mod_base = cm
  modified_base 18: mod_base = OTHER; note = 2-O-methylribose adenine
  modified_base 19: mod_base = OTHER; note = 2-O-methylribose adenine
  modified_base 20: mod_base = cm
  modified_base 20..21: mod_base = OTHER; note = phosphorothioate
  modified_base 21: mod_base = OTHER; note = 2-O-methylribose adenine
  source 1..21: mol_type = other RNA
atgtggtagactgcagcaaca

SEQ ID NO: 883 - RNA, 21 nt, synthetic construct
  misc_feature 1..21: note = Synthetic: WV-43176
  misc_feature 1..21: note = Synthetic: SSR-0106395
  modified_base 1: mod_base = OTHER; note = mono GalNAc C5-amino-C6-pyrrolidine linked by phosphate to mono GalNAc C5-amino-C6-pyrrolidine linked by phosphate the 5' end of 2-O-methylribose guanine
  modified_base 1..2: mod_base = OTHER; note = phosphorothioate
  modified_base 2: mod_base = um
  modified_base 3: mod_base = gm
  modified_base 4: mod_base = gm
  modified_base 5: mod_base = um
  modified_base 6: mod_base = OTHER; note = 2-O-methylribose adenine
  modified_base 7: mod_base = OTHER; note = 2-fluororibose guanine
  modified_base 8: mod_base = OTHER; note = 2-O-methylribose adenine
  modified_base 9: mod_base = OTHER; note = 2-fluororibose cytosine
  modified_base 10: mod_base = OTHER; note = 2-fluororibose uracil
  modified_base 11: mod_base = OTHER; note = 2-fluororibose guanine
  modified_base 12: mod_base = cm
  modified_base 13: mod_base = OTHER; note = 2-O-methylribose adenine
  modified_base 14: mod_base = gm
  modified_base 15: mod_base = cm
  modified_base 16: mod_base = OTHER; note = 2-O-methylribose adenine
  modified_base 17: mod_base = OTHER; note = 2-O-methylribose adenine
  modified_base 18: mod_base = cm
  modified_base 19: mod_base = OTHER; note = 2-O-methylribose adenine
  modified_base 20: mod_base = gm
  modified_base 20..21: mod_base = OTHER; note = phosphorothioate
  modified_base 21: mod_base = OTHER; note = 2-O-methylribose adenine
  source 1..21: mol_type = other RNA
gtggtagactgcagcaacaga

SEQ ID NO: 884 - RNA, 21 nt, synthetic construct
  misc_feature 1..21: note = Synthetic: WV-43177
  misc_feature 1..21: note = Synthetic: SSR-0106396
  modified_base 1: mod_base = OTHER; note = mono GalNAc C5-amino-C6-pyrrolidine linked by phosphate to mono GalNAc C5-amino-C6-pyrrolidine linked by phosphate the 5' end of 2-O-methylribose adenine
  modified_base 1..2: mod_base = OTHER; note = phosphorothioate
  modified_base 2: mod_base = OTHER; note = 2-O-methylribose adenine
  modified_base 3: mod_base = cm
  modified_base 4: mod_base = OTHER; note = 2-O-methylribose adenine
  modified_base 5: mod_base = um
  modified_base 6: mod_base = cm
  modified_base 7: mod_base = OTHER; note = 2-fluororibose cytosine
  modified_base 8: mod_base = um
  modified_base 9: mod_base = OTHER; note = 2-fluororibose adenine
  modified_base 10: mod_base = OTHER; note = 2-fluororibose guanine
  modified_base 11: mod_base = OTHER; note = 2-fluororibose guanine
  modified_base 12: mod_base = OTHER; note = 2-O-methylribose adenine
  modified_base 13: mod_base = cm
  modified_base 14: mod_base = OTHER; note = 2-O-methylribose adenine
  modified_base 15: mod_base = um
  modified_base 16: mod_base = um
  modified_base 17: mod_base = um
  modified_base 18: mod_base = um
  modified_base 19: mod_base = um
  modified_base 20: mod_base = gm
  modified_base 20..21: mod_base = OTHER; note = phosphorothioate
  modified_base 21: mod_base = OTHER; note = 2-O-methylribose adenine
  source 1..21: mol_type = other RNA
aacatcctaggacatttttga

SEQ ID NO: 885 - RNA, 21 nt, synthetic construct
  misc_feature 1..21: note = Synthetic: WV-43178
  misc_feature 1..21: note = Synthetic: SSR-0106397
  modified_base 1: mod_base = OTHER; note = mono GalNAc C5-amino-C6-pyrrolidine linked by phosphate to mono GalNAc C5-amino-C6-pyrrolidine linked by phosphate the 5' end of 2-O-methylribose uracil
  modified_base 1..2: mod_base = OTHER; note = phosphorothioate
  modified_base 2: mod_base = OTHER; note = 2-O-methylribose adenine
  modified_base 3: mod_base = OTHER; note = 2-O-methylribose adenine
  modified_base 4: mod_base = OTHER; note = 2-O-methylribose adenine
  modified_base 5: mod_base = um
  modified_base 6: mod_base = cm
  modified_base 7: mod_base = OTHER; note = 2-fluororibose guanine
  modified_base 8: mod_base = um
  modified_base 9: mod_base = OTHER; note = 2-fluororibose adenine
  modified_base 10: mod_base = OTHER; note = 2-fluororibose uracil
  modified_base 11: mod_base = OTHER; note = 2-fluororibose guanine
  modified_base 12: mod_base = cm
  modified_base 13: mod_base = OTHER; note = 2-O-methylribose adenine
  modified_base 14: mod_base = gm
  modified_base 15: mod_base = OTHER; note = 2-O-methylribose adenine
  modified_base 16: mod_base = OTHER; note = 2-O-methylribose adenine
  modified_base 17: mod_base = um
  modified_base 18: mod_base = OTHER; note = 2-O-methylribose adenine
  modified_base 19: mod_base = um
  modified_base 20: mod_base = um
  modified_base 20..21: mod_base = OTHER; note = phosphorothioate
  modified_base 21: mod_base = OTHER; note = 2-O-methylribose adenine
  source 1..21: mol_type = other RNA
taaatcgtatgcagaatatta

SEQ ID NO: 886 - RNA, 21 nt, synthetic construct
  misc_feature 1..21: note = Synthetic: WV-43179
  misc_feature 1..21: note = Synthetic: SSR-0106398
  modified_base 1: mod_base = OTHER; note = mono GalNAc C5-amino-C6-pyrrolidine linked by phosphate to mono GalNAc C5-amino-C6-pyrrolidine linked by phosphate the 5' end of 2-O-methylribose adenine
  modified_base 1..2: mod_base = OTHER; note = phosphorothioate
  modified_base 2: mod_base = um
  modified_base 3: mod_base = cm
  modified_base 4: mod_base = gm
  modified_base 5: mod_base = um
  modified_base 6: mod_base = OTHER; note = 2-O-methylribose adenine
  modified_base 7: mod_base = OTHER; note = 2-fluororibose uracil
  modified_base 8: mod_base = gm
  modified_base 9: mod_base = OTHER; note = 2-fluororibose cytosine
  modified_base 10: mod_base = OTHER; note = 2-fluororibose adenine
  modified_base 11: mod_base = OTHER; note = 2-fluororibose guanine
  modified_base 12: mod_base = OTHER; note = 2-O-methylribose adenine
  modified_base 13: mod_base = OTHER; note = 2-O-methylribose adenine
  modified_base 14: mod_base = um
  modified_base 15: mod_base = OTHER; note = 2-O-methylribose adenine
  modified_base 16: mod_base = um
  modified_base 17: mod_base = um
  modified_base 18: mod_base = cm
  modified_base 19: mod_base = OTHER; note = 2-O-methylribose adenine
  modified_base 20: mod_base = OTHER; note = 2-O-methylribose adenine
  modified_base 20..21: mod_base = OTHER; note = phosphorothioate
  modified_base 21: mod_base = OTHER; note = 2-O-methylribose adenine
  source 1..21: mol_type = other RNA
atcgtatgcagaatattcaaa

SEQ ID NO: 887 - RNA, 21 nt, synthetic construct
  misc_feature 1..21: note = Synthetic: WV-43180
  misc_feature 1..21: note = Synthetic: SSR-0106399
  modified_base 1: mod_base = OTHER; note = mono GalNAc C5-amino-C6-pyrrolidine linked by phosphate to mono GalNAc C5-amino-C6-pyrrolidine linked by phosphate the 5' end of 2-O-methylribose cytosine
  modified_base 1..2: mod_base = OTHER; note = phosphorothioate
  modified_base 2: mod_base = gm
  modified_base 3: mod_base = um
  modified_base 4: mod_base = OTHER; note = 2-O-methylribose adenine
  modified_base 5: mod_base = um
  modified_base 6: mod_base = gm
  modified_base 7: mod_base = OTHER; note = 2-fluororibose cytosine
  modified_base 8: mod_base = OTHER; note = 2-O-methylribose adenine
  modified_base 9: mod_base = OTHER; note = 2-fluororibose guanine
  modified_base 10: mod_base = OTHER; note = 2-fluororibose adenine
  modified_base 11: mod_base = OTHER; note = 2-fluororibose adenine
  modified_base 12: mod_base = um
  modified_base 13: mod_base = OTHER; note = 2-O-methylribose adenine
  modified_base 14: mod_base = um
  modified_base 15: mod_base = um
  modified_base 16: mod_base = cm
  modified_base 17: mod_base = OTHER; note = 2-O-methylribose adenine
  modified_base 18: mod_base = OTHER; note = 2-O-methylribose adenine
  modified_base 19: mod_base = um
  modified_base 20: mod_base = um
  modified_base 20..21: mod_base = OTHER; note = phosphorothioate
  modified_base 21: mod_base = OTHER; note = 2-O-methylribose adenine
  source 1..21: mol_type = other RNA
cgtatgcagaatattcaatta

SEQ ID NO: 888 - RNA, 21 nt, synthetic construct
  misc_feature 1..21: note = Synthetic: WV-43181
  misc_feature 1..21: note = Synthetic: SSR-0106400
  modified_base 1: mod_base = OTHER; note = mono GalNAc C5-amino-C6-pyrrolidine linked by phosphate to mono GalNAc C5-amino-C6-pyrrolidine linked by phosphate the 5' end of 2-O-methylribose uracil
  modified_base 1..2: mod_base = OTHER; note = phosphorothioate
  modified_base 2: mod_base = OTHER; note = 2-O-methylribose adenine
  modified_base 3: mod_base = um
  modified_base 4: mod_base = gm
  modified_base 5: mod_base = cm
  modified_base 6: mod_base = OTHER; note = 2-O-methylribose adenine
  modified_base 7: mod_base = OTHER; note = 2-fluororibose guanine
  modified_base 8: mod_base = OTHER; note = 2-O-methylribose adenine
  modified_base 9: mod_base = OTHER; note = 2-fluororibose adenine
  modified_base 10: mod_base = OTHER; note = 2-fluororibose uracil
  modified_base 11: mod_base = OTHER; note = 2-fluororibose adenine
  modified_base 12: mod_base = um
  modified_base 13: mod_base = um
  modified_base 14: mod_base = cm
  modified_base 15: mod_base = OTHER; note = 2-O-methylribose adenine
  modified_base 16: mod_base = OTHER; note = 2-O-methylribose adenine
  modified_base 17: mod_base = um
  modified_base 18: mod_base = um
  modified_base 19: mod_base = um
  modified_base 20: mod_base = gm
  modified_base 20..21: mod_base = OTHER; note = phosphorothioate
  modified_base 21: mod_base = OTHER; note = 2-O-methylribose adenine
  source 1..21: mol_type = other RNA
tatgcagaatattcaatttga

SEQ ID NO: 889 - RNA, 21 nt, synthetic construct
  misc_feature 1..21: note = Synthetic: WV-43182
  misc_feature 1..21: note = Synthetic: SSR-0106401
  modified_base 1: mod_base = OTHER; note = mono GalNAc C5-amino-C6-pyrrolidine linked by phosphate to mono GalNAc C5-amino-C6-pyrrolidine linked by phosphate the 5' end of 2-O-methylribose uracil
  modified_base 1..2: mod_base = OTHER; note = phosphorothioate
  modified_base 2: mod_base = gm
  modified_base 3: mod_base = cm
  modified_base 4: mod_base = OTHER; note = 2-O-methylribose adenine
  modified_base 5: mod_base = OTHER; note = 2-O-methylribose adenine
  modified_base 6: mod_base = cm
  modified_base 7: mod_base = OTHER; note = 2-fluororibose uracil
  modified_base 8: mod_base = cm
  modified_base 9: mod_base = OTHER; note = 2-fluororibose uracil
  modified_base 10: mod_base = OTHER; note = 2-fluororibose adenine
  modified_base 11: mod_base = OTHER; note = 2-fluororibose uracil
  modified_base 12: mod_base = um
  modified_base 13: mod_base = cm
  modified_base 14: mod_base = um
  modified_base 15: mod_base = gm
  modified_base 16: mod_base = gm
  modified_base 17: mod_base = OTHER; note = 2-O-methylribose adenine
  modified_base 18: mod_base = cm
  modified_base 19: mod_base = um
  modified_base 20: mod_base = um
  modified_base 20..21: mod_base = OTHER; note = phosphorothioate
  modified_base 21: mod_base = OTHER; note = 2-O-methylribose adenine
  source 1..21: mol_type = other RNA
tgcaactctattctggactta

SEQ ID NO: 890 - RNA, 21 nt, synthetic construct
  misc_feature 1..21: note = Synthetic: WV-43183
  misc_feature 1..21: note = Synthetic: SSR-0106402
  modified_base 1: mod_base = OTHER; note = mono GalNAc C5-amino-C6-pyrrolidine linked by phosphate to mono GalNAc C5-amino-C6-pyrrolidine linked by phosphate the 5' end of 2-O-methylribose cytosine
  modified_base 1..2: mod_base = OTHER; note = phosphorothioate
  modified_base 2: mod_base = OTHER; note = 2-O-methylribose adenine
  modified_base 3: mod_base = OTHER; note = 2-O-methylribose adenine
  modified_base 4: mod_base = cm
  modified_base 5: mod_base = um
  modified_base 6: mod_base = cm
  modified_base 7: mod_base = OTHER; note = 2-fluororibose uracil
  modified_base 8: mod_base = OTHER; note = 2-O-methylribose adenine
  modified_base 9: mod_base = OTHER; note = 2-fluororibose uracil
  modified_base 10: mod_base = OTHER; note = 2-fluororibose uracil
  modified_base 11: mod_base = OTHER; note = 2-fluororibose cytosine
  modified_base 12: mod_base = um
  modified_base 13: mod_base = gm
  modified_base 14: mod_base = gm
  modified_base 15: mod_base = OTHER; note = 2-O-methylribose adenine
  modified_base 16: mod_base = cm
  modified_base 17: mod_base = um
  modified_base 18: mod_base = um
  modified_base 19: mod_base = um
  modified_base 20: mod_base = OTHER; note = 2-O-methylribose adenine
  modified_base 20..21: mod_base = OTHER; note = phosphorothioate
  modified_base 21: mod_base = OTHER; note = 2-O-methylribose adenine
  source 1..21: mol_type = other RNA
caactctattctggactttaa

SEQ ID NO: 891 - RNA, 21 nt, synthetic construct
  misc_feature 1..21: note = Synthetic: WV-43184
  misc_feature 1..21: note = Synthetic: SSR-0106403
  modified_base 1: mod_base = OTHER; note = mono GalNAc C5-amino-C6-pyrrolidine linked by phosphate to mono GalNAc C5-amino-C6-pyrrolidine linked by phosphate the 5' end of 2-O-methylribose adenine
  modified_base 1..2: mod_base = OTHER; note = phosphorothioate
  modified_base 2: mod_base = um
  modified_base 3: mod_base = um
  modified_base 4: mod_base = cm
  modified_base 5: mod_base = um
  modified_base 6: mod_base = gm
  modified_base 7: mod_base = OTHER; note = 2-fluororibose guanine
  modified_base 8: mod_base = OTHER; note = 2-O-methylribose adenine
  modified_base 9: mod_base = OTHER; note = 2-fluororibose cytosine
  modified_base 10: mod_base = OTHER; note = 2-fluororibose uracil
  modified_base 11: mod_base = OTHER; note = 2-fluororibose uracil
  modified_base 12: mod_base = um
  modified_base 13: mod_base = OTHER; note = 2-O-methylribose adenine
  modified_base 14: mod_base = um
  modified_base 15: mod_base = um
  modified_base 16: mod_base = OTHER; note = 2-O-methylribose adenine
  modified_base 17: mod_base = cm
  modified_base 18: mod_base = um
  modified_base 19: mod_base = um
  modified_base 20: mod_base = gm
  modified_base 20..21: mod_base = OTHER; note = phosphorothioate
  modified_base 21: mod_base = OTHER; note = 2-O-methylribose adenine
  source 1..21: mol_type = other RNA
attctggactttattacttga

SEQ ID NO: 892 - RNA, 21 nt, synthetic construct
  misc_feature 1..21: note = Synthetic: WV-43185
  misc_feature 1..21: note = Synthetic: SSR-0106404
  modified_base 1: mod_base = OTHER; note = mono GalNAc C5-amino-C6-pyrrolidine linked by phosphate to mono GalNAc C5-amino-C6-pyrrolidine linked by phosphate the 5' end of 2-O-methylribose uracil
  modified_base 1..2: mod_base = OTHER; note = phosphorothioate
  modified_base 2: mod_base = cm
  modified_base 3: mod_base = cm
  modified_base 4: mod_base = OTHER; note = 2-O-methylribose adenine
  modified_base 5: mod_base = cm
  modified_base 6: mod_base = cm
  modified_base 7: mod_base = OTHER; note = 2-fluororibose adenine
  modified_base 8: mod_base = OTHER; note = 2-O-methylribose adenine
  modified_base 9: mod_base = OTHER; note = 2-fluororibose adenine
  modified_base 10: mod_base = OTHER; note = 2-fluororibose adenine
  modified_base 11: mod_base = OTHER; note = 2-fluororibose guanine
  modified_base 12: mod_base = um
  modified_base 13: mod_base = gm
  modified_base 14: mod_base = gm
  modified_base 15: mod_base = OTHER; note = 2-O-methylribose adenine
  modified_base 16: mod_base = cm
  modified_base 17: mod_base = cm
  modified_base 18: mod_base = cm
  modified_base 19: mod_base = um
  modified_base 20: mod_base = cm
  modified_base 20..21: mod_base = OTHER; note = phosphorothioate
  modified_base 21: mod_base = OTHER; note = 2-O-methylribose adenine
  source 1..21: mol_type = other RNA
tccaccaaaagtggaccctca

SEQ ID NO: 893 - RNA, 21 nt, synthetic construct
  misc_feature 1..21: note = Synthetic: WV-43186
  misc_feature 1..21: note = Synthetic: SSR-0106405
  modified_base 1: mod_base = OTHER; note = mono GalNAc C5-amino-C6-pyrrolidine linked by phosphate to mono GalNAc C5-amino-C6-pyrrolidine linked by phosphate the 5' end of 2-O-methylribose cytosine
  modified_base 1..2: mod_base = OTHER; note = phosphorothioate
  modified_base 2: mod_base = cm
  modified_base 3: mod_base = OTHER; note = 2-O-methylribose adenine
  modified_base 4: mod_base = cm
  modified_base 5: mod_base = cm
  modified_base 6: mod_base = OTHER; note = 2-O-methylribose adenine
  modified_base 7: mod_base = OTHER; note = 2-fluororibose adenine
  modified_base 8: mod_base = OTHER; note = 2-O-methylribose adenine
  modified_base 9: mod_base = OTHER; note = 2-fluororibose adenine
  modified_base 10: mod_base = OTHER; note = 2-fluororibose guanine
  modified_base 11: mod_base = OTHER; note = 2-fluororibose uracil
  modified_base 12: mod_base = gm
  modified_base 13: mod_base = gm
  modified_base 14: mod_base = OTHER; note = 2-O-methylribose adenine
  modified_base 15: mod_base = cm
  modified_base 16: mod_base = cm
  modified_base 17: mod_base = cm
  modified_base 18: mod_base = um
  modified_base 19: mod_base = cm
  modified_base 20: mod_base = um
  modified_base 20..21: mod_base = OTHER; note = phosphorothioate
  modified_base 21: mod_base = OTHER; note = 2-O-methylribose adenine
  source 1..21: mol_type = other RNA
ccaccaaaagtggaccctcta

SEQ ID NO: 894 - RNA, 21 nt, synthetic construct
  misc_feature 1..21: note = Synthetic: WV-43187
  misc_feature 1..21: note = Synthetic: SSR-0106406
  modified_base 1: mod_base = OTHER; note = mono GalNAc C5-amino-C6-pyrrolidine linked by phosphate to mono GalNAc C5-amino-C6-pyrrolidine linked by phosphate the 5' end of 2-O-methylribose adenine
  modified_base 1..2: mod_base = OTHER; note = phosphorothioate
  modified_base 2: mod_base = cm
  modified_base 3: mod_base = cm
  modified_base 4: mod_base = OTHER; note = 2-O-methylribose adenine
  modified_base 5: mod_base = OTHER; note = 2-O-methylribose adenine
  modified_base 6: mod_base = OTHER; note = 2-O-methylribose adenine
  modified_base 7: mod_base = OTHER; note = 2-fluororibose adenine
  modified_base 8: mod_base = gm
  modified_base 9: mod_base = OTHER; note = 2-fluororibose uracil
  modified_base 10: mod_base = OTHER; note = 2-fluororibose guanine
  modified_base 11: mod_base = OTHER; note = 2-fluororibose guanine
  modified_base 12: mod_base = OTHER; note = 2-O-methylribose adenine
  modified_base 13: mod_base = cm
  modified_base 14: mod_base = cm
  modified_base 15: mod_base = cm
  modified_base 16: mod_base = um
  modified_base 17: mod_base = cm
  modified_base 18: mod_base = um
  modified_base 19: mod_base = OTHER; note = 2-O-methylribose adenine
  modified_base 20: mod_base = um
  modified_base 20..21: mod_base = OTHER; note = phosphorothioate
  modified_base 21: mod_base = OTHER; note = 2-O-methylribose adenine
  source 1..21: mol_type = other RNA
accaaaagtggaccctctata

SEQ ID NO: 895 - RNA, 21 nt, synthetic construct
  misc_feature 1..21: note = Synthetic: WV-43188
  misc_feature 1..21: note = Synthetic: SSR-0106407
  modified_base 1: mod_base = OTHER; note = mono GalNAc C5-amino-C6-pyrrolidine linked by phosphate to mono GalNAc C5-amino-C6-pyrrolidine linked by phosphate the 5' end of 2-O-methylribose cytosine
  modified_base 1..2: mod_base = OTHER; note = phosphorothioate
  modified_base 2: mod_base = cm
  modified_base 3: mod_base = OTHER; note = 2-O-methylribose adenine
  modified_base 4: mod_base = OTHER; note = 2-O-methylribose adenine
  modified_base 5: mod_base = OTHER; note = 2-O-methylribose adenine
  modified_base 6: mod_base = OTHER; note = 2-O-methylribose adenine
  modified_base 7: mod_base = OTHER; note = 2-fluororibose guanine
  modified_base 8: mod_base = um
  modified_base 9: mod_base = OTHER; note = 2-fluororibose guanine
  modified_base 10: mod_base = OTHER; note = 2-fluororibose guanine
  modified_base 11: mod_base = OTHER; note = 2-fluororibose adenine
  modified_base 12: mod_base = cm
  modified_base 13: mod_base = cm
  modified_base 14: mod_base = cm
  modified_base 15: mod_base = um
  modified_base 16: mod_base = cm
  modified_base 17: mod_base = um
  modified_base 18: mod_base = OTHER; note = 2-O-methylribose adenine
  modified_base 19: mod_base = um
  modified_base 20: mod_base = OTHER; note = 2-O-methylribose adenine
  modified_base 20..21: mod_base = OTHER; note = phosphorothioate
  modified_base 21: mod_base = OTHER; note = 2-O-methylribose adenine
  source 1..21: mol_type = other RNA
ccaaaagtggaccctctataa

SEQ ID NO: 896 - RNA, 21 nt, synthetic construct
  misc_feature 1..21: note = Synthetic: WV-43189
  misc_feature 1..21: note = Synthetic: SSR-0106408
  modified_base 1: mod_base = OTHER; note = mono GalNAc C5-amino-C6-pyrrolidine linked by phosphate to mono GalNAc C5-amino-C6-pyrrolidine linked by phosphate the 5' end of 2-O-methylribose cytosine
  modified_base 1..2: mod_base = OTHER; note = phosphorothioate
  modified_base 2: mod_base = cm
  modified_base 3: mod_base = cm
  modified_base 4: mod_base = um
  modified_base 5: mod_base = cm
  modified_base 6: mod_base = um
  modified_base 7: mod_base = OTHER; note = 2-fluororibose adenine
  modified_base 8: mod_base = um
  modified_base 9: mod_base = OTHER; note = 2-fluororibose adenine
  modified_base 10: mod_base = OTHER; note = 2-fluororibose uracil
  modified_base 11: mod_base = OTHER; note = 2-fluororibose uracil
  modified_base 12: mod_base = um
  modified_base 13: mod_base = cm
  modified_base 14: mod_base = cm
  modified_base 15: mod_base = um
  modified_base 16: mod_base = cm
  modified_base 17: mod_base = cm
  modified_base 18: mod_base = cm
  modified_base 19: mod_base = um
  modified_base 20: mod_base = um
  modified_base 20..21: mod_base = OTHER; note = phosphorothioate
  modified_base 21: mod_base = OTHER; note = 2-O-methylribose adenine
  source 1..21: mol_type = other RNA
ccctctatatttcctccctta

SEQ ID NO: 897 - RNA, 21 nt, synthetic construct
  misc_feature 1..21: note = Synthetic: WV-43190
  misc_feature 1..21: note = Synthetic: SSR-0106409
  modified_base 1: mod_base = OTHER; note = mono GalNAc C5-amino-C6-pyrrolidine linked by phosphate to mono GalNAc C5-amino-C6-pyrrolidine linked by phosphate the 5' end of 2-O-methylribose adenine
  modified_base 1..2: mod_base = OTHER; note = phosphorothioate
  modified_base 2: mod_base = gm
  modified_base 3: mod_base = OTHER; note = 2-O-methylribose adenine
  modified_base 4: mod_base = cm
  modified_base 5: mod_base = OTHER; note = 2-O-methylribose adenine
  modified_base 6: mod_base = OTHER; note = 2-O-methylribose adenine
  modified_base 7: mod_base = OTHER; note = 2-fluororibose uracil
  modified_base 8: mod_base = um
  modified_base 9: mod_base = OTHER; note = 2-fluororibose uracil
  modified_base 10: mod_base = OTHER; note = 2-fluororibose uracil
  modified_base 11: mod_base = OTHER; note = 2-fluororibose adenine
  modified_base 12: mod_base = gm
  modified_base 13: mod_base = gm
  modified_base 14: mod_base = cm
  modified_base 15: mod_base = um
  modified_base 16: mod_base = cm
  modified_base 17: mod_base = OTHER; note = 2-O-methylribose adenine
  modified_base 18: mod_base = OTHER; note = 2-O-methylribose adenine
  modified_base 19: mod_base = OTHER; note = 2-O-methylribose adenine
  modified_base 20: mod_base = OTHER; note = 2-O-methylribose adenine
  modified_base 20..21: mod_base = OTHER; note = phosphorothioate
  modified_base 21: mod_base = OTHER; note = 2-O-methylribose adenine
  source 1..21: mol_type = other RNA
agacaattttaggctcaaaaa

SEQ ID NO: 898 - RNA, 21 nt, synthetic construct
  misc_feature 1..21: note = Synthetic: WV-43191
  misc_feature 1..21: note = Synthetic: SSR-0106410
  modified_base 1: mod_base = OTHER; note = mono GalNAc C5-amino-C6-pyrrolidine linked by phosphate to mono GalNAc C5-amino-C6-pyrrolidine linked by phosphate the 5' end of 2-O-methylribose adenine
  modified_base 1..2: mod_base = OTHER; note = phosphorothioate
  modified_base 2: mod_base = gm
  modified_base 3: mod_base = gm
  modified_base 4: mod_base = OTHER; note = 2-O-methylribose adenine
  modified_base 5: mod_base = OTHER; note = 2-O-methylribose adenine
  modified_base 6: mod_base = cm
  modified_base 7: mod_base = OTHER; note = 2-fluororibose uracil
  modified_base 8: mod_base = gm
  modified_base 9: mod_base = OTHER; note = 2-fluororibose uracil
  modified_base 10: mod_base = OTHER; note = 2-fluororibose adenine
  modified_base 11: mod_base = OTHER; note = 2-fluororibose cytosine
  modified_base 12: mod_base = um
  modified_base 13: mod_base = gm
  modified_base 14: mod_base = gm
  modified_base 15: mod_base = cm
  modified_base 16: mod_base = um
  modified_base 17: mod_base = OTHER; note = 2-O-methylribose adenine
  modified_base 18: mod_base = um
  modified_base 19: mod_base = um
  modified_base 20: mod_base = OTHER; note = 2-O-methylribose adenine
  modified_base 20..21: mod_base = OTHER; note = phosphorothioate
  modified_base 21: mod_base = OTHER; note = 2-O-methylribose adenine
  source 1..21: mol_type = other RNA
aggaactgtactggctattaa

SEQ ID NO: 899 - RNA, 21 nt, synthetic construct
  misc_feature 1..21: note = Synthetic: WV-43192
  misc_feature 1..21: note = Synthetic: SSR-0106411
  modified_base 1: mod_base = OTHER; note = mono GalNAc C5-amino-C6-pyrrolidine linked by phosphate to mono GalNAc C5-amino-C6-pyrrolidine linked by phosphate the 5' end of 2-O-methylribose guanine
  modified_base 1..2: mod_base = OTHER; note = phosphorothioate
  modified_base 2: mod_base = gm
  modified_base 3: mod_base = OTHER; note = 2-O-methylribose adenine
  modified_base 4: mod_base = OTHER; note = 2-O-methylribose adenine
  modified_base 5: mod_base = cm
  modified_base 6: mod_base = um
  modified_base 7: mod_base = OTHER; note = 2-fluororibose guanine
  modified_base 8: mod_base = um
  modified_base 9: mod_base = OTHER; note = 2-fluororibose adenine
  modified_base 10: mod_base = OTHER; note = 2-fluororibose cytosine
  modified_base 11: mod_base = OTHER; note = 2-fluororibose uracil
  modified_base 12: mod_base = gm
  modified_base 13: mod_base = gm
  modified_base 14: mod_base = cm
  modified_base 15: mod_base = um
  modified_base 16: mod_base = OTHER; note = 2-O-methylribose adenine
  modified_base 17: mod_base = um
  modified_base 18: mod_base = um
  modified_base 19: mod_base = OTHER; note = 2-O-methylribose adenine
  modified_base 20: mod_base = cm
  modified_base 20..21: mod_base = OTHER; note = phosphorothioate
  modified_base 21: mod_base = OTHER; note = 2-O-methylribose adenine
  source 1..21: mol_type = other RNA
ggaactgtactggctattaca

SEQ ID NO: 900 - RNA, 21 nt, synthetic construct
  misc_feature 1..21: note = Synthetic: WV-43193
  misc_feature 1..21: note = Synthetic: SSR-0106412
  modified_base 1: mod_base = OTHER; note = mono GalNAc C5-amino-C6-pyrrolidine linked by phosphate to mono GalNAc C5-amino-C6-pyrrolidine linked by phosphate the 5' end of 2-O-methylribose adenine
  modified_base 1..2: mod_base = OTHER; note = phosphorothioate
  modified_base 2: mod_base = OTHER; note = 2-O-methylribose adenine
  modified_base 3: mod_base = OTHER; note = 2-O-methylribose adenine
  modified_base 4: mod_base = OTHER; note = 2-O-methylribose adenine
  modified_base 5: mod_base = um
  modified_base 6: mod_base = OTHER; note = 2-O-methylribose adenine
  modified_base 7: mod_base = OTHER; note = 2-fluororibose adenine
  modified_base 8: mod_base = um
  modified_base 9: mod_base = OTHER; note = 2-fluororibose cytosine
  modified_base 10: mod_base = OTHER; note = 2-fluororibose cytosine
  modified_base 11: mod_base = OTHER; note = 2-fluororibose guanine
  modified_base 12: mod_base = OTHER; note = 2-O-methylribose adenine
  modified_base 13: mod_base = cm
  modified_base 14: mod_base = um
  modified_base 15: mod_base = cm
  modified_base 16: mod_base = cm
  modified_base 17: mod_base = cm
  modified_base 18: mod_base = OTHER; note = 2-O-methylribose adenine
  modified_base 19: mod_base = cm
  modified_base 20: mod_base = um
  modified_base 20..21: mod_base = OTHER; note = phosphorothioate
  modified_base 21: mod_base = OTHER; note = 2-O-methylribose adenine
  source 1..21: mol_type = other RNA
aaaataatccgactcccacta

SEQ ID NO: 901 - RNA, 21 nt, synthetic construct
  misc_feature 1..21: note = Synthetic: WV-43194
  misc_feature 1..21: note = Synthetic: SSR-0106413
  modified_base 1: mod_base = OTHER; note = mono GalNAc C5-amino-C6-pyrrolidine linked by phosphate to mono GalNAc C5-amino-C6-pyrrolidine linked by phosphate the 5' end of 2-O-methylribose adenine
  modified_base 1..2: mod_base = OTHER; note = phosphorothioate
  modified_base 2: mod_base = OTHER; note = 2-O-methylribose adenine
  modified_base 3: mod_base = um
  modified_base 4: mod_base = cm
  modified_base 5: mod_base = cm
  modified_base 6: mod_base = gm
  modified_base 7: mod_base = OTHER; note = 2-fluororibose adenine
  modified_base 8: mod_base = cm
  modified_base 9: mod_base = OTHER; note = 2-fluororibose uracil
  modified_base 10: mod_base = OTHER; note = 2-fluororibose cytosine
  modified_base 11: mod_base = OTHER; note = 2-fluororibose cytosine
  modified_base 12: mod_base = cm
  modified_base 13: mod_base = OTHER; note = 2-O-methylribose adenine
  modified_base 14: mod_base = cm
  modified_base 15: mod_base = um
  modified_base 16: mod_base = OTHER; note = 2-O-methylribose adenine
  modified_base 17: mod_base = cm
  modified_base 18: mod_base = OTHER; note = 2-O-methylribose adenine
  modified_base 19: mod_base = um
  modified_base 20: mod_base = cm
  modified_base 20..21: mod_base = OTHER; note = phosphorothioate
  modified_base 21: mod_base = OTHER; note = 2-O-methylribose adenine
  source 1..21: mol_type = other RNA
aatccgactcccactacatca

SEQ ID NO: 902 - RNA, 21 nt, synthetic construct
  misc_feature 1..21: note = Synthetic: WV-43195
  misc_feature 1..21: note = Synthetic: SSR-0106414
  modified_base 1: mod_base = OTHER; note = mono GalNAc C5-amino-C6-pyrrolidine linked by phosphate to mono GalNAc C5-amino-C6-pyrrolidine linked by phosphate the 5' end of 2-O-methylribose adenine
  modified_base 1..2: mod_base = OTHER; note = phosphorothioate
  modified_base 2: mod_base = um
  modified_base 3: mod_base = cm
  modified_base 4: mod_base = cm
  modified_base 5: mod_base = gm
  modified_base 6: mod_base = OTHER; note = 2-O-methylribose adenine
  modified_base 7: mod_base = OTHER; note = 2-fluororibose cytosine
  modified_base 8: mod_base = um
  modified_base 9: mod_base = OTHER; note = 2-fluororibose cytosine
  modified_base 10: mod_base = OTHER; note = 2-fluororibose cytosine
  modified_base 11: mod_base = OTHER; note = 2-fluororibose cytosine
  modified_base 12: mod_base = OTHER; note = 2-O-methylribose adenine
  modified_base 13: mod_base = cm
  modified_base 14: mod_base = um
  modified_base 15: mod_base = OTHER; note = 2-O-methylribose adenine
  modified_base 16: mod_base = cm
  modified_base 17: mod_base = OTHER; note = 2-O-methylribose adenine
  modified_base 18: mod_base = um
  modified_base 19: mod_base = cm
  modified_base 20: mod_base = OTHER; note = 2-O-methylribose adenine
  modified_base 20..21: mod_base = OTHER; note = phosphorothioate
  modified_base 21: mod_base = OTHER; note = 2-O-methylribose adenine
  source 1..21: mol_type = other RNA
atccgactcccactacatcaa

SEQ ID NO: 903 - RNA, 21 nt, synthetic construct
  misc_feature 1..21: note = Synthetic: WV-43196
  misc_feature 1..21: note = Synthetic: SSR-0106415
  modified_base 1: mod_base = OTHER; note = mono GalNAc C5-amino-C6-pyrrolidine linked by phosphate to mono GalNAc C5-amino-C6-pyrrolidine linked by phosphate the 5' end of 2-O-methylribose uracil
  modified_base 1..2: mod_base = OTHER; note = phosphorothioate
  modified_base 2: mod_base = cm
  modified_base 3: mod_base = cm
  modified_base 4: mod_base = cm
  modified_base 5: mod_base = OTHER; note = 2-O-methylribose adenine
  modified_base 6: mod_base = cm
  modified_base 7: mod_base = OTHER; note = 2-fluororibose uracil
  modified_base 8: mod_base = OTHER; note = 2-O-methylribose adenine
  modified_base 9: mod_base = OTHER; note = 2-fluororibose cytosine
  modified_base 10: mod_base = OTHER; note = 2-fluororibose adenine
  modified_base 11: mod_base = OTHER; note = 2-fluororibose uracil
  modified_base 12: mod_base = cm
  modified_base 13: mod_base = OTHER; note = 2-O-methylribose adenine
  modified_base 14: mod_base = OTHER; note = 2-O-methylribose adenine
  modified_base 15: mod_base = gm
  modified_base 16: mod_base = OTHER; note = 2-O-methylribose adenine
  modified_base 17: mod_base = cm
  modified_base 18: mod_base = um
  modified_base 19: mod_base = OTHER; note = 2-O-methylribose adenine
  modified_base 20: mod_base = OTHER; note = 2-O-methylribose adenine
  modified_base 20..21: mod_base = OTHER; note = phosphorothioate
  modified_base 21: mod_base = OTHER; note = 2-O-methylribose adenine
  source 1..21: mol_type = other RNA
tcccactacatcaagactaaa

SEQ ID NO: 904 - RNA, 21 nt, synthetic construct
  misc_feature 1..21: note = Synthetic: WV-43197
  misc_feature 1..21: note = Synthetic: SSR-0106416
  modified_base 1: mod_base = OTHER; note = mono GalNAc C5-amino-C6-pyrrolidine linked by phosphate to mono GalNAc C5-amino-C6-pyrrolidine linked by phosphate the 5' end of 2-O-methylribose cytosine
  modified_base 1..2: mod_base = OTHER; note = phosphorothioate
  modified_base 2: mod_base = cm
  modified_base 3: mod_base = cm
  modified_base 4: mod_base = OTHER; note = 2-O-methylribose adenine
  modified_base 5: mod_base = cm
  modified_base 6: mod_base = um
  modified_base 7: mod_base = OTHER; note = 2-fluororibose adenine
  modified_base 8: mod_base = cm
  modified_base 9: mod_base = OTHER; note = 2-fluororibose adenine
  modified_base 10: mod_base = OTHER; note = 2-fluororibose uracil
  modified_base 11: mod_base = OTHER; note = 2-fluororibose cytosine
  modified_base 12: mod_base = OTHER; note = 2-O-methylribose adenine
  modified_base 13: mod_base = OTHER; note = 2-O-methylribose adenine
  modified_base 14: mod_base = gm
  modified_base 15: mod_base = OTHER; note = 2-O-methylribose adenine
  modified_base 16: mod_base = cm
  modified_base 17: mod_base = um
  modified_base 18: mod_base = OTHER; note = 2-O-methylribose adenine
  modified_base 19: mod_base = OTHER; note = 2-O-methylribose adenine
  modified_base 20: mod_base = um
  modified_base 20..21: mod_base = OTHER; note = phosphorothioate
  modified_base 21: mod_base = OTHER; note = 2-O-methylribose adenine
  source 1..21: mol_type = other RNA
cccactacatcaagactaata

SEQ ID NO: 905 - RNA, 21 nt, synthetic construct
  misc_feature 1..21: note = Synthetic: WV-43198
  misc_feature 1..21: note = Synthetic: SSR-0106417
  modified_base 1: mod_base = OTHER; note = mono GalNAc C5-amino-C6-pyrrolidine linked by phosphate to mono GalNAc C5-amino-C6-pyrrolidine linked by phosphate the 5' end of 2-O-methylribose cytosine
  modified_base 1..2: mod_base = OTHER; note = phosphorothioate
  modified_base 2: mod_base = cm
  modified_base 3: mod_base = OTHER; note = 2-O-methylribose adenine
  modified_base 4: mod_base = cm
  modified_base 5: mod_base = um
  modified_base 6: mod_base = OTHER; note = 2-O-methylribose adenine
  modified_base 7: mod_base = OTHER; note = 2-fluororibose cytosine
  modified_base 8: mod_base = OTHER; note = 2-O-methylribose adenine
  modified_base 9: mod_base = OTHER; note = 2-fluororibose uracil
  modified_base 10: mod_base = OTHER; note = 2-fluororibose cytosine
  modified_base 11: mod_base = OTHER; note = 2-fluororibose adenine
  modified_base 12: mod_base = OTHER; note = 2-O-methylribose adenine
  modified_base 13: mod_base = gm
  modified_base 14: mod_base = OTHER; note = 2-O-methylribose adenine
  modified_base 15: mod_base = cm
  modified_base 16: mod_base = um
  modified_base 17: mod_base = OTHER; note = 2-O-methylribose adenine
  modified_base 18: mod_base = OTHER; note = 2-O-methylribose adenine
  modified_base 19: mod_base = um
  modified_base 20: mod_base = cm
  modified_base 20..21: mod_base = OTHER; note = phosphorothioate
  modified_base 21: mod_base = OTHER; note = 2-O-methylribose adenine
  source 1..21: mol_type = other RNA
ccactacatcaagactaatca

SEQ ID NO: 906 - RNA, 21 nt, synthetic construct
  misc_feature 1..21: note = Synthetic: WV-43199
  misc_feature 1..21: note = Synthetic: SSR-0106418
  modified_base 1: mod_base = OTHER; note = mono GalNAc C5-amino-C6-pyrrolidine linked by phosphate to mono GalNAc C5-amino-C6-pyrrolidine linked by phosphate the 5' end of 2-O-methylribose cytosine
  modified_base 1..2: mod_base = OTHER; note = phosphorothioate
  modified_base 2: mod_base = OTHER; note = 2-O-methylribose adenine
  modified_base 3: mod_base = cm
  modified_base 4: mod_base = um
  modified_base 5: mod_base = OTHER; note = 2-O-methylribose adenine
  modified_base 6: mod_base = cm
  modified_base 7: mod_base = OTHER; note = 2-fluororibose adenine
  modified_base 8: mod_base = um
  modified_base 9: mod_base = OTHER; note = 2-fluororibose cytosine
  modified_base 10: mod_base = OTHER; note = 2-fluororibose adenine
  modified_base 11: mod_base = OTHER; note = 2-fluororibose adenine
  modified_base 12: mod_base = gm
  modified_base 13: mod_base = OTHER; note = 2-O-methylribose adenine
  modified_base 14: mod_base = cm
  modified_base 15: mod_base = um
  modified_base 16: mod_base = OTHER; note = 2-O-methylribose adenine
  modified_base 17: mod_base = OTHER; note = 2-O-methylribose adenine
  modified_base 18: mod_base = um
  modified_base 19: mod_base = cm
  modified_base 20: mod_base = um
  modified_base 20..21: mod_base = OTHER; note = phosphorothioate
  modified_base 21: mod_base = OTHER; note = 2-O-methylribose adenine
  source 1..21: mol_type = other RNA
cactacatcaagactaatcta

SEQ ID NO: 907 - RNA, 21 nt, synthetic construct
  misc_feature 1..21: note = Synthetic: WV-43200
  misc_feature 1..21: note = Synthetic: SSR-0106419
  modified_base 1: mod_base = OTHER; note = mono GalNAc C5-amino-C6-pyrrolidine linked by phosphate to mono GalNAc C5-amino-C6-pyrrolidine linked by phosphate the 5' end of 2-O-methylribose cytosine
  modified_base 1..2: mod_base = OTHER; note = phosphorothioate
  modified_base 2: mod_base = um
  modified_base 3: mod_base = OTHER; note = 2-O-methylribose adenine
  modified_base 4: mod_base = cm
  modified_base 5: mod_base = OTHER; note = 2-O-methylribose adenine
  modified_base 6: mod_base = um
  modified_base 7: mod_base = OTHER; note = 2-fluororibose cytosine
  modified_base 8: mod_base = OTHER; note = 2-O-methylribose adenine
  modified_base 9: mod_base = OTHER; note = 2-fluororibose adenine
  modified_base 10: mod_base = OTHER; note = 2-fluororibose guanine
  modified_base 11: mod_base = OTHER; note = 2-fluororibose adenine
  modified_base 12: mod_base = cm
  modified_base 13: mod_base = um
  modified_base 14: mod_base = OTHER; note = 2-O-methylribose adenine
  modified_base 15: mod_base = OTHER; note = 2-O-methylribose adenine
  modified_base 16: mod_base = um
  modified_base 17: mod_base = cm
  modified_base 18: mod_base = um
  modified_base 19: mod_base = um
  modified_base 20: mod_base = gm
  modified_base 20..21: mod_base = OTHER; note = phosphorothioate
  modified_base 21: mod_base = OTHER; note = 2-O-methylribose adenine
  source 1..21: mol_type = other RNA
ctacatcaagactaatcttga

SEQ ID NO: 908 - RNA, 21 nt, synthetic construct
  misc_feature 1..21: note = Synthetic: WV-43201
  misc_feature 1..21: note = Synthetic: SSR-0106420
  modified_base 1: mod_base = OTHER; note = mono GalNAc C5-amino-C6-pyrrolidine linked by phosphate to mono GalNAc C5-amino-C6-pyrrolidine linked by phosphate the 5' end of 2-O-methylribose uracil
  modified_base 1..2: mod_base = OTHER; note = phosphorothioate
  modified_base 2: mod_base = um
  modified_base 3: mod_base = um
  modified_base 4: mod_base = gm
  modified_base 5: mod_base = um
  modified_base 6: mod_base = gm
  modified_base 7: mod_base = OTHER; note = 2-fluororibose uracil
  modified_base 8: mod_base = gm
  modified_base 9: mod_base = OTHER; note = 2-fluororibose uracil
  modified_base 10: mod_base = OTHER; note = 2-fluororibose uracil
  modified_base 11: mod_base = OTHER; note = 2-fluororibose uracil
  modified_base 12: mod_base = um
  modified_base 13: mod_base = um
  modified_base 14: mod_base = cm
  modified_base 15: mod_base = OTHER; note = 2-O-methylribose adenine
  modified_base 16: mod_base = cm
  modified_base 17: mod_base = OTHER; note = 2-O-methylribose adenine
  modified_base 18: mod_base = um
  modified_base 19: mod_base = gm
  modified_base 20: mod_base = um
  modified_base 20..21: mod_base = OTHER; note = phosphorothioate
  modified_base 21: mod_base = OTHER; note = 2-O-methylribose adenine
  source 1..21: mol_type = other RNA
tttgtgtgtttttcacatgta

SEQ ID NO: 909 - RNA, 21 nt, synthetic construct
  misc_feature 1..21: note = Synthetic: WV-43202
  misc_feature 1..21: note = Synthetic: SSR-0106421
  modified_base 1: mod_base = OTHER; note = mono GalNAc C5-amino-C6-pyrrolidine linked by phosphate to mono GalNAc C5-amino-C6-pyrrolidine linked by phosphate the 5' end of 2-O-methylribose guanine
  modified_base 1..2: mod_base = OTHER; note = phosphorothioate
  modified_base 2: mod_base = um
  modified_base 3: mod_base = gm
  modified_base 4: mod_base = um
  modified_base 5: mod_base = gm
  modified_base 6: mod_base = um
  modified_base 7: mod_base = OTHER; note = 2-fluororibose uracil
  modified_base 8: mod_base = um
  modified_base 9: mod_base = OTHER; note = 2-fluororibose uracil
  modified_base 10: mod_base = OTHER; note = 2-fluororibose uracil
  modified_base 11: mod_base = OTHER; note = 2-fluororibose cytosine
  modified_base 12: mod_base = OTHER; note = 2-O-methylribose adenine
  modified_base 13: mod_base = cm
  modified_base 14: mod_base = OTHER; note = 2-O-methylribose adenine
  modified_base 15: mod_base = um
  modified_base 16: mod_base = gm
  modified_base 17: mod_base = um
  modified_base 18: mod_base = OTHER; note = 2-O-methylribose adenine
  modified_base 19: mod_base = um
  modified_base 20: mod_base = um
  modified_base 20..21: mod_base = OTHER; note = phosphorothioate
  modified_base 21: mod_base = OTHER; note = 2-O-methylribose adenine
  source 1..21: mol_type = other RNA
gtgtgtttttcacatgtatta

SEQ ID NO: 910 - RNA, 21 nt, synthetic construct
  misc_feature 1..21: note = Synthetic: WV-43203
  misc_feature 1..21: note = Synthetic: SSR-0106422
  modified_base 1: mod_base = OTHER; note = mono GalNAc C5-amino-C6-pyrrolidine linked by phosphate to mono GalNAc C5-amino-C6-pyrrolidine linked by phosphate the 5' end of 2-O-methylribose guanine
  modified_base 1..2: mod_base = OTHER; note = phosphorothioate
  modified_base 2: mod_base = um
  modified_base 3: mod_base = um
  modified_base 4: mod_base = um
  modified_base 5: mod_base = um
  modified_base 6: mod_base = um
  modified_base 7: mod_base = OTHER; note = 2-fluororibose cytosine
  modified_base 8: mod_base = OTHER; note = 2-O-methylribose adenine
  modified_base 9: mod_base = OTHER; note = 2-fluororibose cytosine
  modified_base 10: mod_base = OTHER; note = 2-fluororibose adenine
  modified_base 11: mod_base = OTHER; note = 2-fluororibose uracil
  modified_base 12: mod_base = gm
  modified_base 13: mod_base = um
  modified_base 14: mod_base = OTHER; note = 2-O-methylribose adenine
  modified_base 15: mod_base = um
  modified_base 16: mod_base = um
  modified_base 17: mod_base = OTHER; note = 2-O-methylribose adenine
  modified_base 18: mod_base = um
  modified_base 19: mod_base = OTHER; note = 2-O-methylribose adenine
  modified_base 20: mod_base = gm
  modified_base 20..21: mod_base = OTHER; note = phosphorothioate
  modified_base 21: mod_base = OTHER; note = 2-O-methylribose adenine
  source 1..21: mol_type = other RNA
gtttttcacatgtattataga

SEQ ID NO: 911 - RNA, 21 nt, synthetic construct
  misc_feature 1..21: note = Synthetic: WV-43204
  misc_feature 1..21: note = Synthetic: SSR-0106423
  modified_base 1: mod_base = OTHER; note = mono GalNAc C5-amino-C6-pyrrolidine linked by phosphate to mono GalNAc C5-amino-C6-pyrrolidine linked by phosphate the 5' end of 2-O-methylribose uracil
  modified_base 1..2: mod_base = OTHER; note = phosphorothioate
  modified_base 2: mod_base = OTHER; note = 2-O-methylribose adenine
  modified_base 3: mod_base = um
  modified_base 4: mod_base = OTHER; note = 2-O-methylribose adenine
  modified_base 5: mod_base = gm
  modified_base 6: mod_base = OTHER; note = 2-O-methylribose adenine
  modified_base 7: mod_base = OTHER; note = 2-fluororibose adenine
  modified_base 8: mod_base = um
  modified_base 9: mod_base = OTHER; note = 2-fluororibose guanine
  modified_base 10: mod_base = OTHER; note = 2-fluororibose cytosine
  modified_base 11: mod_base = OTHER; note = 2-fluororibose uracil
  modified_base 12: mod_base = um
  modified_base 13: mod_base = um
  modified_base 14: mod_base = um
  modified_base 15: mod_base = gm
  modified_base 16: mod_base = cm
  modified_base 17: mod_base = OTHER; note = 2-O-methylribose adenine
  modified_base 18: mod_base = um
  modified_base 19: mod_base = gm
  modified_base 20: mod_base = gm
  modified_base 20..21: mod_base = OTHER; note = phosphorothioate
  modified_base 21: mod_base = OTHER; note = 2-O-methylribose adenine
  source 1..21: mol_type = other RNA
tatagaatgcttttgcatgga

SEQ ID NO: 912 - RNA, 21 nt, synthetic construct
  misc_feature 1..21: note = Synthetic: WV-43205
  misc_feature 1..21: note = Synthetic: SSR-0106424
  modified_base 1: mod_base = OTHER; note = mono GalNAc C5-amino-C6-pyrrolidine linked by phosphate to mono GalNAc C5-amino-C6-pyrrolidine linked by phosphate the 5' end of 2-O-methylribose adenine
  modified_base 1..2: mod_base = OTHER; note = phosphorothioate
  modified_base 2: mod_base = um
  modified_base 3: mod_base = OTHER; note = 2-O-methylribose adenine
  modified_base 4: mod_base = gm
  modified_base 5: mod_base = OTHER; note = 2-O-methylribose adenine
  modified_base 6: mod_base = OTHER; note = 2-O-methylribose adenine
  modified_base 7: mod_base = OTHER; note = 2-fluororibose uracil
  modified_base 8: mod_base = gm
  modified_base 9: mod_base = OTHER; note = 2-fluororibose cytosine
  modified_base 10: mod_base = OTHER; note = 2-fluororibose uracil
  modified_base 11: mod_base = OTHER; note = 2-fluororibose uracil
  modified_base 12: mod_base = um
  modified_base 13: mod_base = um
  modified_base 14: mod_base = gm
  modified_base 15: mod_base = cm
  modified_base 16: mod_base = OTHER; note = 2-O-methylribose adenine
  modified_base 17: mod_base = um
  modified_base 18: mod_base = gm
  modified_base 19: mod_base = gm
  modified_base 20: mod_base = OTHER; note = 2-O-methylribose adenine
  modified_base 20..21: mod_base = OTHER; note = phosphorothioate
  modified_base 21: mod_base = OTHER; note = 2-O-methylribose adenine
  source 1..21: mol_type = other RNA
atagaatgcttttgcatggaa

SEQ ID NO: 913 - RNA, 21 nt, synthetic construct
  misc_feature 1..21: note = Synthetic: WV-43206
  misc_feature 1..21: note = Synthetic: SSR-0106425
  modified_base 1: mod_base = OTHER; note = mono GalNAc C5-amino-C6-pyrrolidine linked by phosphate to mono GalNAc C5-amino-C6-pyrrolidine linked by phosphate the 5' end of 2-O-methylribose uracil
  modified_base 1..2: mod_base = OTHER; note = phosphorothioate
  modified_base 2: mod_base = OTHER; note = 2-O-methylribose adenine
  modified_base 3: mod_base = gm
  modified_base 4: mod_base = OTHER; note = 2-O-methylribose adenine
  modified_base 5: mod_base = OTHER; note = 2-O-methylribose adenine
  modified_base 6: mod_base = um
  modified_base 7: mod_base = OTHER; note = 2-fluororibose guanine
  modified_base 8: mod_base = cm
  modified_base 9: mod_base = OTHER; note = 2-fluororibose uracil
  modified_base 10: mod_base = OTHER; note = 2-fluororibose uracil
  modified_base 11: mod_base = OTHER; note = 2-fluororibose uracil
  modified_base 12: mod_base = um
  modified_base 13: mod_base = gm
  modified_base 14: mod_base = cm
  modified_base 15: mod_base = OTHER; note = 2-O-methylribose adenine
  modified_base 16: mod_base = um
  modified_base 17: mod_base = gm
  modified_base 18: mod_base = gm
  modified_base 19: mod_base = OTHER; note = 2-O-methylribose adenine
  modified_base 20: mod_base = cm
  modified_base 20..21: mod_base = OTHER; note = phosphorothioate
  modified_base 21: mod_base = OTHER; note = 2-O-methylribose adenine
  source 1..21: mol_type = other RNA
tagaatgcttttgcatggaca

SEQ ID NO: 914 - RNA, 21 nt, synthetic construct
  misc_feature 1..21: note = Synthetic: WV-43207
  misc_feature 1..21: note = Synthetic: SSR-0106426
  modified_base 1: mod_base = OTHER; note = mono GalNAc C5-amino-C6-pyrrolidine linked by phosphate to mono GalNAc C5-amino-C6-pyrrolidine linked by phosphate the 5' end of 2-O-methylribose adenine
  modified_base 1..2: mod_base = OTHER; note = phosphorothioate
  modified_base 2: mod_base = gm
  modified_base 3: mod_base = OTHER; note = 2-O-methylribose adenine
  modified_base 4: mod_base = OTHER; note = 2-O-methylribose adenine
  modified_base 5: mod_base = um
  modified_base 6: mod_base = gm
  modified_base 7: mod_base = OTHER; note = 2-fluororibose cytosine
  modified_base 8: mod_base = um
  modified_base 9: mod_base = OTHER; note = 2-fluororibose uracil
  modified_base 10: mod_base = OTHER; note = 2-fluororibose uracil
  modified_base 11: mod_base = OTHER; note = 2-fluororibose uracil
  modified_base 12: mod_base = gm
  modified_base 13: mod_base = cm
  modified_base 14: mod_base = OTHER; note = 2-O-methylribose adenine
  modified_base 15: mod_base = um
  modified_base 16: mod_base = gm
  modified_base 17: mod_base = gm
  modified_base 18: mod_base = OTHER; note = 2-O-methylribose adenine
  modified_base 19: mod_base = cm
  modified_base 20: mod_base = um
  modified_base 20..21: mod_base = OTHER; note = phosphorothioate
  modified_base 21: mod_base = OTHER; note = 2-O-methylribose adenine
  source 1..21: mol_type = other RNA
agaatgcttttgcatggacta

SEQ ID NO: 915 - RNA, 21 nt, synthetic construct
  misc_feature 1..21: note = Synthetic: WV-43208
  misc_feature 1..21: note = Synthetic: SSR-0106427
  modified_base 1: mod_base = OTHER; note = mono GalNAc C5-amino-C6-pyrrolidine linked by phosphate to mono GalNAc C5-amino-C6-pyrrolidine linked by phosphate the 5' end of 2-O-methylribose guanine
  modified_base 1..2: mod_base = OTHER; note = phosphorothioate
  modified_base 2: mod_base = OTHER; note = 2-O-methylribose adenine
  modified_base 3: mod_base = OTHER; note = 2-O-methylribose adenine
  modified_base 4: mod_base = um
  modified_base 5: mod_base = gm
  modified_base 6: mod_base = cm
  modified_base 7: mod_base = OTHER; note = 2-fluororibose uracil
  modified_base 8: mod_base = um
  modified_base 9: mod_base = OTHER; note = 2-fluororibose uracil
  modified_base 10: mod_base = OTHER; note = 2-fluororibose uracil
  modified_base 11: mod_base = OTHER; note = 2-fluororibose guanine
  modified_base 12: mod_base = cm
  modified_base 13: mod_base = OTHER; note = 2-O-methylribose adenine
  modified_base 14: mod_base = um
  modified_base 15: mod_base = gm
  modified_base 16: mod_base = gm
  modified_base 17: mod_base = OTHER; note = 2-O-methylribose adenine
  modified_base 18: mod_base = cm
  modified_base 19: mod_base = um
  modified_base 20: mod_base = OTHER; note = 2-O-methylribose adenine
  modified_base 20..21: mod_base = OTHER; note = phosphorothioate
  modified_base 21: mod_base = OTHER; note = 2-O-methylribose adenine
  source 1..21: mol_type = other RNA
gaatgcttttgcatggactaa

SEQ ID NO: 916 - RNA, 21 nt, synthetic construct
  misc_feature 1..21: note = Synthetic: WV-43209
  misc_feature 1..21: note = Synthetic: SSR-0106428
  modified_base 1: mod_base = OTHER; note = mono GalNAc C5-amino-C6-pyrrolidine linked by phosphate to mono GalNAc C5-amino-C6-pyrrolidine linked by phosphate the 5' end of 2-O-methylribose adenine
  modified_base 1..2: mod_base = OTHER; note = phosphorothioate
  modified_base 2: mod_base = um
  modified_base 3: mod_base = gm
  modified_base 4: mod_base = cm
  modified_base 5: mod_base = um
  modified_base 6: mod_base = um
  modified_base 7: mod_base = OTHER; note = 2-fluororibose uracil
  modified_base 8: mod_base = um
  modified_base 9: mod_base = OTHER; note = 2-fluororibose guanine
  modified_base 10: mod_base = OTHER; note = 2-fluororibose cytosine
  modified_base 11: mod_base = OTHER; note = 2-fluororibose adenine
  modified_base 12: mod_base = um
  modified_base 13: mod_base = gm
  modified_base 14: mod_base = gm
  modified_base 15: mod_base = OTHER; note = 2-O-methylribose adenine
  modified_base 16: mod_base = cm
  modified_base 17: mod_base = um
  modified_base 18: mod_base = OTHER; note = 2-O-methylribose adenine
  modified_base 19: mod_base = um
  modified_base 20: mod_base = cm
  modified_base 20..21: mod_base = OTHER; note = phosphorothioate
  modified_base 21: mod_base = OTHER; note = 2-O-methylribose adenine
  source 1..21: mol_type = other RNA
atgcttttgcatggactatca

SEQ ID NO: 917 - RNA, 21 nt, synthetic construct
  misc_feature 1..21: note = Synthetic: WV-43210
  misc_feature 1..21: note = Synthetic: SSR-0106429
  modified_base 1: mod_base = OTHER; note = mono GalNAc C5-amino-C6-pyrrolidine linked by phosphate to mono GalNAc C5-amino-C6-pyrrolidine linked by phosphate the 5' end of 2-O-methylribose uracil
  modified_base 1..2: mod_base = OTHER; note = phosphorothioate
  modified_base 2: mod_base = gm
  modified_base 3: mod_base = cm
  modified_base 4: mod_base = um
  modified_base 5: mod_base = um
  modified_base 6: mod_base = um
  modified_base 7: mod_base = OTHER; note = 2-fluororibose uracil
  modified_base 8: mod_base = gm
  modified_base 9: mod_base = OTHER; note = 2-fluororibose cytosine
  modified_base 10: mod_base = OTHER; note = 2-fluororibose adenine
  modified_base 11: mod_base = OTHER; note = 2-fluororibose uracil
  modified_base 12: mod_base = gm
  modified_base 13: mod_base = gm
  modified_base 14: mod_base = OTHER; note = 2-O-methylribose adenine
  modified_base 15: mod_base = cm
  modified_base 16: mod_base = um
  modified_base 17: mod_base = OTHER; note = 2-O-methylribose adenine
  modified_base 18: mod_base = um
  modified_base 19: mod_base = cm
  modified_base 20: mod_base = cm
  modified_base 20..21: mod_base = OTHER; note = phosphorothioate
  modified_base 21: mod_base = OTHER; note = 2-O-methylribose adenine
  source 1..21: mol_type = other RNA
tgcttttgcatggactatcca

SEQ ID NO: 918 - RNA, 21 nt, synthetic construct
  misc_feature 1..21: note = Synthetic: WV-43211
  misc_feature 1..21: note = Synthetic: SSR-0106430
  modified_base 1: mod_base = OTHER; note = mono GalNAc C5-amino-C6-pyrrolidine linked by phosphate to mono GalNAc C5-amino-C6-pyrrolidine linked by phosphate the 5' end of 2-O-methylribose uracil
  modified_base 1..2: mod_base = OTHER; note = phosphorothioate
  modified_base 2: mod_base = um
  modified_base 3: mod_base = um
  modified_base 4: mod_base = um
  modified_base 5: mod_base = gm
  modified_base 6: mod_base = cm
  modified_base 7: mod_base = OTHER; note = 2-fluororibose adenine
  modified_base 8: mod_base = um
  modified_base 9: mod_base = OTHER; note = 2-fluororibose guanine
  modified_base 10: mod_base = OTHER; note = 2-fluororibose guanine
  modified_base 11: mod_base = OTHER; note = 2-fluororibose adenine
  modified_base 12: mod_base = cm
  modified_base 13: mod_base = um
  modified_base 14: mod_base = OTHER; note = 2-O-methylribose adenine
  modified_base 15: mod_base = um
  modified_base 16: mod_base = cm
  modified_base 17: mod_base = cm
  modified_base 18: mod_base = um
  modified_base 19: mod_base = cm
  modified_base 20: mod_base = um
  modified_base 20..21: mod_base = OTHER; note = phosphorothioate
  modified_base 21: mod_base = OTHER; note = 2-O-methylribose adenine
  source 1..21: mol_type = other RNA
ttttgcatggactatcctcta

SEQ ID NO: 919 - RNA, 21 nt, synthetic construct
  misc_feature 1..21: note = Synthetic: WV-43212
  misc_feature 1..21: note = Synthetic: SSR-0106431
  modified_base 1: mod_base = OTHER; note = mono GalNAc C5-amino-C6-pyrrolidine linked by phosphate to mono GalNAc C5-amino-C6-pyrrolidine linked by phosphate the 5' end of 2-O-methylribose uracil
  modified_base 1..2: mod_base = OTHER; note = phosphorothioate
  modified_base 2: mod_base = um
  modified_base 3: mod_base = um
  modified_base 4: mod_base = gm
  modified_base 5: mod_base = cm
  modified_base 6: mod_base = OTHER; note = 2-O-methylribose adenine
  modified_base 7: mod_base = OTHER; note = 2-fluororibose uracil
  modified_base 8: mod_base = gm
  modified_base 9: mod_base = OTHER; note = 2-fluororibose guanine
  modified_base 10: mod_base = OTHER; note = 2-fluororibose adenine
  modified_base 11: mod_base = OTHER; note = 2-fluororibose cytosine
  modified_base 12: mod_base = um
  modified_base 13: mod_base = OTHER; note = 2-O-methylribose adenine
  modified_base 14: mod_base = um
  modified_base 15: mod_base = cm
  modified_base 16: mod_base = cm
  modified_base 17: mod_base = um
  modified_base 18: mod_base = cm
  modified_base 19: mod_base = um
  modified_base 20: mod_base = um
  modified_base 20..21: mod_base = OTHER; note = phosphorothioate
  modified_base 21: mod_base = OTHER; note = 2-O-methylribose adenine
  source 1..21: mol_type = other RNA
tttgcatggactatcctctta

SEQ ID NO: 920 - RNA, 21 nt, synthetic construct
  misc_feature 1..21: note = Synthetic: WV-43213
  misc_feature 1..21: note = Synthetic: SSR-0106432
  modified_base 1: mod_base = OTHER; note = mono GalNAc C5-amino-C6-pyrrolidine linked by phosphate to mono GalNAc C5-amino-C6-pyrrolidine linked by phosphate the 5' end of 2-O-methylribose uracil
  modified_base 1..2: mod_base = OTHER; note = phosphorothioate
  modified_base 2: mod_base = um
  modified_base 3: mod_base = gm
  modified_base 4: mod_base = cm
  modified_base 5: mod_base = OTHER; note = 2-O-methylribose adenine
  modified_base 6: mod_base = um
  modified_base 7: mod_base = OTHER; note = 2-fluororibose guanine
  modified_base 8: mod_base = gm
  modified_base 9: mod_base = OTHER; note = 2-fluororibose adenine
  modified_base 10: mod_base = OTHER; note = 2-fluororibose cytosine
  modified_base 11: mod_base = OTHER; note = 2-fluororibose uracil
  modified_base 12: mod_base = OTHER; note = 2-O-methylribose adenine
  modified_base 13: mod_base = um
  modified_base 14: mod_base = cm
  modified_base 15: mod_base = cm
  modified_base 16: mod_base = um
  modified_base 17: mod_base = cm
  modified_base 18: mod_base = um
  modified_base 19: mod_base = um
  modified_base 20: mod_base = gm
  modified_base 20..21: mod_base = OTHER; note = phosphorothioate
  modified_base 21: mod_base = OTHER; note = 2-O-methylribose adenine
  source 1..21: mol_type = other RNA
ttgcatggactatcctcttga

SEQ ID NO: 921 - RNA, 21 nt, synthetic construct
  misc_feature 1..21: note = Synthetic: WV-43214
  misc_feature 1..21: note = Synthetic: SSR-0106433
  modified_base 1: mod_base = OTHER; note = mono GalNAc C5-amino-C6-pyrrolidine linked by phosphate to mono GalNAc C5-amino-C6-pyrrolidine linked by phosphate the 5' end of 2-O-methylribose guanine
  modified_base 1..2: mod_base = OTHER; note = phosphorothioate
  modified_base 2: mod_base = cm
  modified_base 3: mod_base = OTHER; note = 2-O-methylribose adenine
  modified_base 4: mod_base = um
  modified_base 5: mod_base = gm
  modified_base 6: mod_base = gm
  modified_base 7: mod_base = OTHER; note = 2-fluororibose adenine
  modified_base 8: mod_base = cm
  modified_base 9: mod_base = OTHER; note = 2-fluororibose uracil
  modified_base 10: mod_base = OTHER; note = 2-fluororibose adenine
  modified_base 11: mod_base = OTHER; note = 2-fluororibose uracil
  modified_base 12: mod_base = cm
  modified_base 13: mod_base = cm
  modified_base 14: mod_base = um
  modified_base 15: mod_base = cm
  modified_base 16: mod_base = um
  modified_base 17: mod_base = um
  modified_base 18: mod_base = gm
  modified_base 19: mod_base = um
  modified_base 20: mod_base = um
  modified_base 20..21: mod_base = OTHER; note = phosphorothioate
  modified_base 21: mod_base = OTHER; note = 2-O-methylribose adenine
  source 1..21: mol_type = other RNA
gcatggactatcctcttgtta

SEQ ID NO: 922 - RNA, 21 nt, synthetic construct
  misc_feature 1..21: note = Synthetic: WV-43215
  misc_feature 1..21: note = Synthetic: SSR-0106434
  modified_base 1: mod_base = OTHER; note = mono GalNAc C5-amino-C6-pyrrolidine linked by phosphate to mono GalNAc C5-amino-C6-pyrrolidine linked by phosphate the 5' end of 2-O-methylribose cytosine
  modified_base 1..2: mod_base = OTHER; note = phosphorothioate
  modified_base 2: mod_base = OTHER; note = 2-O-methylribose adenine
  modified_base 3: mod_base = um
  modified_base 4: mod_base = gm
  modified_base 5: mod_base = gm
  modified_base 6: mod_base = OTHER; note = 2-O-methylribose adenine
  modified_base 7: mod_base = OTHER; note = 2-fluororibose cytosine
  modified_base 8: mod_base = um
  modified_base 9: mod_base = OTHER; note = 2-fluororibose adenine
  modified_base 10: mod_base = OTHER; note = 2-fluororibose uracil
  modified_base 11: mod_base = OTHER; note = 2-fluororibose cytosine
  modified_base 12: mod_base = cm
  modified_base 13: mod_base = um
  modified_base 14: mod_base = cm
  modified_base 15: mod_base = um
  modified_base 16: mod_base = um
  modified_base 17: mod_base = gm
  modified_base 18: mod_base = um
  modified_base 19: mod_base = um
  modified_base 20: mod_base = um
  modified_base 20..21: mod_base = OTHER; note = phosphorothioate
  modified_base 21: mod_base = OTHER; note = 2-O-methylribose adenine
  source 1..21: mol_type = other RNA
catggactatcctcttgttta

SEQ ID NO: 923 - RNA, 21 nt, synthetic construct
  misc_feature 1..21: note = Synthetic: WV-43216
  misc_feature 1..21: note = Synthetic: SSR-0106435
  modified_base 1: mod_base = OTHER; note = mono GalNAc C5-amino-C6-pyrrolidine linked by phosphate to mono GalNAc C5-amino-C6-pyrrolidine linked by phosphate the 5' end of 2-O-methylribose cytosine
  modified_base 1..2: mod_base = OTHER; note = phosphorothioate
  modified_base 2: mod_base = um
  modified_base 3: mod_base = OTHER; note = 2-O-methylribose adenine
  modified_base 4: mod_base = um
  modified_base 5: mod_base = cm
  modified_base 6: mod_base = cm
  modified_base 7: mod_base = OTHER; note = 2-fluororibose uracil
  modified_base 8: mod_base = cm
  modified_base 9: mod_base = OTHER; note = 2-fluororibose uracil
  modified_base 10: mod_base = OTHER; note = 2-fluororibose uracil
  modified_base 11: mod_base = OTHER; note = 2-fluororibose guanine
  modified_base 12: mod_base = um
  modified_base 13: mod_base = um
  modified_base 14: mod_base = um
  modified_base 15: mod_base = um
  modified_base 16: mod_base = um
  modified_base 17: mod_base = OTHER; note = 2-O-methylribose adenine
  modified_base 18: mod_base = um
  modified_base 19: mod_base = um
  modified_base 20: mod_base = OTHER; note = 2-O-methylribose adenine
  modified_base 20..21: mod_base = OTHER; note = phosphorothioate
  modified_base 21: mod_base = OTHER; note = 2-O-methylribose adenine
  source 1..21: mol_type = other RNA
ctatcctcttgtttttattaa

SEQ ID NO: 924 - RNA, 21 nt, synthetic construct
  misc_feature 1..21: note = Synthetic: WV-43217
  misc_feature 1..21: note = Synthetic: SSR-0106436
  modified_base 1: mod_base = OTHER; note = mono GalNAc C5-amino-C6-pyrrolidine linked by phosphate to mono GalNAc C5-amino-C6-pyrrolidine linked by phosphate the 5' end of 2-O-methylribose uracil
  modified_base 1..2: mod_base = OTHER; note = phosphorothioate
  modified_base 2: mod_base = OTHER; note = 2-O-methylribose adenine
  modified_base 3: mod_base = um
  modified_base 4: mod_base = cm
  modified_base 5: mod_base = cm
  modified_base 6: mod_base = um
  modified_base 7: mod_base = OTHER; note = 2-fluororibose cytosine
  modified_base 8: mod_base = um
  modified_base 9: mod_base = OTHER; note = 2-fluororibose uracil
  modified_base 10: mod_base = OTHER; note = 2-fluororibose guanine
  modified_base 11: mod_base = OTHER; note = 2-fluororibose uracil
  modified_base 12: mod_base = um
  modified_base 13: mod_base = um
  modified_base 14: mod_base = um
  modified_base 15: mod_base = um
  modified_base 16: mod_base = OTHER; note = 2-O-methylribose adenine
  modified_base 17: mod_base = um
  modified_base 18: mod_base = um
  modified_base 19: mod_base = OTHER; note = 2-O-methylribose adenine
  modified_base 20: mod_base = OTHER; note = 2-O-methylribose adenine
  modified_base 20..21: mod_base = OTHER; note = phosphorothioate
  modified_base 21: mod_base = OTHER; note = 2-O-methylribose adenine
  source 1..21: mol_type = other RNA
tatcctcttgtttttattaaa

SEQ ID NO: 925 - RNA, 21 nt, synthetic construct
  misc_feature 1..21: note = Synthetic: WV-43218
  misc_feature 1..21: note = Synthetic: SSR-0106437
  modified_base 1: mod_base = OTHER; note = mono GalNAc C5-amino-C6-pyrrolidine linked by phosphate to mono GalNAc C5-amino-C6-pyrrolidine linked by phosphate the 5' end of 2-O-methylribose adenine
  modified_base 1..2: mod_base = OTHER; note = phosphorothioate
  modified_base 2: mod_base = OTHER; note = 2-O-methylribose adenine
  modified_base 3: mod_base = OTHER; note = 2-O-methylribose adenine
  modified_base 4: mod_base = OTHER; note = 2-O-methylribose adenine
  modified_base 5: mod_base = um
  modified_base 6: mod_base = OTHER; note = 2-O-methylribose adenine
  modified_base 7: mod_base = OTHER; note = 2-fluororibose adenine
  modified_base 8: mod_base = cm
  modified_base 9: mod_base = OTHER; note = 2-fluororibose cytosine
  modified_base 10: mod_base = OTHER; note = 2-fluororibose uracil
  modified_base 11: mod_base = OTHER; note = 2-fluororibose cytosine
  modified_base 12: mod_base = um
  modified_base 13: mod_base = um
  modified_base 14: mod_base = gm
  modified_base 15: mod_base = um
  modified_base 16: mod_base = OTHER; note = 2-O-methylribose adenine
  modified_base 17: mod_base = gm
  modified_base 18: mod_base = um
  modified_base 19: mod_base = um
  modified_base 20: mod_base = OTHER; note = 2-O-methylribose adenine
  modified_base 20..21: mod_base = OTHER; note = phosphorothioate
  modified_base 21: mod_base = OTHER; note = 2-O-methylribose adenine
  source 1..21: mol_type = other RNA
aaaataacctcttgtagttaa

SEQ ID NO: 926 - RNA, 21 nt, synthetic construct
  misc_feature 1..21: note = Synthetic: WV-43219
  misc_feature 1..21: note = Synthetic: SSR-0106438
  modified_base 1: mod_base = OTHER; note = mono GalNAc C5-amino-C6-pyrrolidine linked by phosphate to mono GalNAc C5-amino-C6-pyrrolidine linked by phosphate the 5' end of 2-O-methylribose adenine
  modified_base 1..2: mod_base = OTHER; note = phosphorothioate
  modified_base 2: mod_base = um
  modified_base 3: mod_base = OTHER; note = 2-O-methylribose adenine
  modified_base 4: mod_base = OTHER; note = 2-O-methylribose adenine
  modified_base 5: mod_base = cm
  modified_base 6: mod_base = cm
  modified_base 7: mod_base = OTHER; note = 2-fluororibose uracil
  modified_base 8: mod_base = cm
  modified_base 9: mod_base = OTHER; note = 2-fluororibose uracil
  modified_base 10: mod_base = OTHER; note = 2-fluororibose uracil
  modified_base 11: mod_base = OTHER; note = 2-fluororibose guanine
  modified_base 12: mod_base = um
  modified_base 13: mod_base = OTHER; note = 2-O-methylribose adenine
  modified_base 14: mod_base = gm
  modified_base 15: mod_base = um
  modified_base 16: mod_base = um
  modified_base 17: mod_base = OTHER; note = 2-O-methylribose adenine
  modified_base 18: mod_base = um
  modified_base 19: mod_base = OTHER; note = 2-O-methylribose adenine
  modified_base 20: mod_base = OTHER; note = 2-O-methylribose adenine
  modified_base 20..21: mod_base = OTHER; note = phosphorothioate
  modified_base 21: mod_base = OTHER; note = 2-O-methylribose adenine
  source 1..21: mol_type = other RNA
ataacctcttgtagttataaa

SEQ ID NO: 927 - RNA, 21 nt, synthetic construct
  misc_feature 1..21: note = Synthetic: WV-44171
  misc_feature 1..21: note = Synthetic: SSR-0101733
  modified_base 1: mod_base = OTHER; note = 6-aminohexanol linked by phosphate to the 5' end of 2-O-methylribose cytosine
  modified_base 1..2: mod_base = OTHER; note = phosphorothioate
  modified_base 2: mod_base = gm
  modified_base 3: mod_base = um
  modified_base 4: mod_base = OTHER; note = 2-O-methylribose adenine
  modified_base 5: mod_base = um
  modified_base 6: mod_base = gm
  modified_base 7: mod_base = OTHER; note = 2-fluororibose cytosine
  modified_base 8: mod_base = OTHER; note = 2-O-methylribose adenine
  modified_base 9: mod_base = OTHER; note = 2-fluororibose guanine
  modified_base 10: mod_base = OTHER; note = 2-fluororibose adenine
  modified_base 11: mod_base = OTHER; note = 2-fluororibose adenine
  modified_base 12: mod_base = um
  modified_base 13: mod_base = OTHER; note = 2-O-methylribose adenine
  modified_base 14: mod_base = um
  modified_base 15: mod_base = um
  modified_base 16: mod_base = cm
  modified_base 17: mod_base = OTHER; note = 2-O-methylribose adenine
  modified_base 18: mod_base = OTHER; note = 2-O-methylribose adenine
  modified_base 19: mod_base = um
  modified_base 20: mod_base = um
  modified_base 20..21: mod_base = OTHER; note = phosphorothioate
  modified_base 21: mod_base = OTHER; note = 2-O-methylribose adenine
  source 1..21: mol_type = other RNA
cgtatgcagaatattcaatta

SEQ ID NO: 928 - RNA, 21 nt, synthetic construct
  misc_feature 1..21: note = Synthetic: WV-44172
  misc_feature 1..21: note = Synthetic: SSR-0101734
  modified_base 1: mod_base = OTHER; note = 6-aminohexanol linked by phosphate to the 5' end of 2-O-methylribose uracil
  modified_base 1..2: mod_base = OTHER; note = phosphorothioate
  modified_base 2: mod_base = OTHER; note = 2-O-methylribose adenine
  modified_base 3: mod_base = um
  modified_base 4: mod_base = gm
  modified_base 5: mod_base = cm
  modified_base 6: mod_base = OTHER; note = 2-O-methylribose adenine
  modified_base 7: mod_base = OTHER; note = 2-fluororibose guanine
  modified_base 8: mod_base = OTHER; note = 2-O-methylribose adenine
  modified_base 9: mod_base = OTHER; note = 2-fluororibose adenine
  modified_base 10: mod_base = OTHER; note = 2-fluororibose uracil
  modified_base 11: mod_base = OTHER; note = 2-fluororibose adenine
  modified_base 12: mod_base = um
  modified_base 13: mod_base = um
  modified_base 14: mod_base = cm
  modified_base 15: mod_base = OTHER; note = 2-O-methylribose adenine
  modified_base 16: mod_base = OTHER; note = 2-O-methylribose adenine
  modified_base 17: mod_base = um
  modified_base 18: mod_base = um
  modified_base 19: mod_base = um
  modified_base 20: mod_base = gm
  modified_base 20..21: mod_base = OTHER; note = phosphorothioate
  modified_base 21: mod_base = OTHER; note = 2-O-methylribose adenine
  source 1..21: mol_type = other RNA
tatgcagaatattcaatttga

SEQ ID NO: 929 - RNA, 21 nt, synthetic construct
  misc_feature 1..21: note = Synthetic: WV-44173
  misc_feature 1..21: note = Synthetic: SSR-0101735
  modified_base 1: mod_base = OTHER; note = triantennary GalNAc with C12 linker linked to 6-aminohexanol linked by phosphate to the 5' end of 2-O-methylribose cytosine
  modified_base 1..2: mod_base = OTHER; note = phosphorothioate
  modified_base 2: mod_base = gm
  modified_base 3: mod_base = um
  modified_base 4: mod_base = OTHER; note = 2-O-methylribose adenine
  modified_base 5: mod_base = um
  modified_base 6: mod_base = gm
  modified_base 7: mod_base = OTHER; note = 2-fluororibose cytosine
  modified_base 8: mod_base = OTHER; note = 2-O-methylribose adenine
  modified_base 9: mod_base = OTHER; note = 2-fluororibose guanine
  modified_base 10: mod_base = OTHER; note = 2-fluororibose adenine
  modified_base 11: mod_base = OTHER; note = 2-fluororibose adenine
  modified_base 12: mod_base = um
  modified_base 13: mod_base = OTHER; note = 2-O-methylribose adenine
  modified_base 14: mod_base = um
  modified_base 15: mod_base = um
  modified_base 16: mod_base = cm
  modified_base 17: mod_base = OTHER; note = 2-O-methylribose adenine
  modified_base 18: mod_base = OTHER; note = 2-O-methylribose adenine
  modified_base 19: mod_base = um
  modified_base 20: mod_base = um
  modified_base 20..21: mod_base = OTHER; note = phosphorothioate
  modified_base 21: mod_base = OTHER; note = 2-O-methylribose adenine
  source 1..21: mol_type = other RNA
cgtatgcagaatattcaatta

SEQ ID NO: 930 - RNA, 21 nt, synthetic construct
  misc_feature 1..21: note = Synthetic: WV-44174
  misc_feature 1..21: note = Synthetic: SSR-0101736
  modified_base 1: mod_base = OTHER; note = triantennary GalNAc with C12 linker linked to 6-aminohexanol linked by phosphate to the 5' end of 2-O-methylribose uracil
  modified_base 1..2: mod_base = OTHER; note = phosphorothioate
  modified_base 2: mod_base = OTHER; note = 2-O-methylribose adenine
  modified_base 3: mod_base = um
  modified_base 4: mod_base = gm
  modified_base 5: mod_base = cm
  modified_base 6: mod_base = OTHER; note = 2-O-methylribose adenine
  modified_base 7: mod_base = OTHER; note = 2-fluororibose guanine
  modified_base 8: mod_base = OTHER; note = 2-O-methylribose adenine
  modified_base 9: mod_base = OTHER; note = 2-fluororibose adenine
  modified_base 10: mod_base = OTHER; note = 2-fluororibose uracil
  modified_base 11: mod_base = OTHER; note = 2-fluororibose adenine
  modified_base 12: mod_base = um
  modified_base 13: mod_base = um
  modified_base 14: mod_base = cm
  modified_base 15: mod_base = OTHER; note = 2-O-methylribose adenine
  modified_base 16: mod_base = OTHER; note = 2-O-methylribose adenine
  modified_base 17: mod_base = um
  modified_base 18: mod_base = um
  modified_base 19: mod_base = um
  modified_base 20: mod_base = gm
  modified_base 20..21: mod_base = OTHER; note = phosphorothioate
  modified_base 21: mod_base = OTHER; note = 2-O-methylribose adenine
  source 1..21: mol_type = other RNA
tatgcagaatattcaatttga

SEQ ID NO: 931 - RNA, 23 nt, synthetic construct
  misc_feature 1..23: note = Synthetic: WV-45021
  misc_feature 1..23: note = Synthetic: SSR-0105003
  modified_base 1: mod_base = um
  modified_base 1..2: mod_base = OTHER; note = R-phosphorothioate
  modified_base 2: mod_base = OTHER; note = 2-fluororibose guanine
  modified_base 2..3: mod_base = OTHER; note = S-phosphorothioate
  modified_base 3: mod_base = um
  modified_base 4: mod_base = gm
  modified_base 5: mod_base = OTHER; note = 2-O-methylribose adenine
  modified_base 6: mod_base = OTHER; note = 2-fluororibose uracil
  modified_base 7: mod_base = cm
  modified_base 8: mod_base = cm
  modified_base 9: mod_base = OTHER; note = 2-O-methylribose adenine
  modified_base 10: mod_base = OTHER; note = 2-O-methylribose adenine
  modified_base 11: mod_base = OTHER; note = 2-O-methylribose adenine
  modified_base 12: mod_base = OTHER; note = 2-O-methylribose adenine
  modified_base 13: mod_base = OTHER; note = 2-O-methylribose adenine
  modified_base 14: mod_base = OTHER; note = 2-fluororibose uracil
  modified_base 15: mod_base = gm
  modified_base 16: mod_base = OTHER; note = 2-fluororibose uracil
  modified_base 17: mod_base = cm
  modified_base 18: mod_base = cm
  modified_base 19: mod_base = um
  modified_base 20: mod_base = OTHER; note = 2-O-methylribose adenine
  modified_base 21: mod_base = gm
  modified_base 21..22: mod_base = OTHER; note = S-phosphorothioate
  modified_base 22: mod_base = um
  modified_base 22..23: mod_base = OTHER; note = S-phosphorothioate
  modified_base 23: mod_base = um
  source 1..23: mol_type = other RNA
tgtgatccaaaaatgtcctagtt

SEQ ID NO: 932 - RNA, 23 nt, synthetic construct
  misc_feature 1..23: note = Synthetic: WV-45022
  misc_feature 1..23: note = Synthetic: SSR-0105048
  modified_base 1: mod_base = um
  modified_base 1..2: mod_base = OTHER; note = S-phosphorothioate
  modified_base 2: mod_base = OTHER; note = 2-fluororibose guanine
  modified_base 2..3: mod_base = OTHER; note = R-phosphorothioate
  modified_base 3: mod_base = um
  modified_base 4: mod_base = gm
  modified_base 5: mod_base = OTHER; note = 2-O-methylribose adenine
  modified_base 6: mod_base = OTHER; note = 2-fluororibose uracil
  modified_base 7: mod_base = cm
  modified_base 8: mod_base = cm
  modified_base 9: mod_base = OTHER; note = 2-O-methylribose adenine
  modified_base 10: mod_base = OTHER; note = 2-O-methylribose adenine
  modified_base 11: mod_base = OTHER; note = 2-O-methylribose adenine
  modified_base 12: mod_base = OTHER; note = 2-O-methylribose adenine
  modified_base 13: mod_base = OTHER; note = 2-O-methylribose adenine
  modified_base 14: mod_base = OTHER; note = 2-fluororibose uracil
  modified_base 15: mod_base = gm
  modified_base 16: mod_base = OTHER; note = 2-fluororibose uracil
  modified_base 17: mod_base = cm
  modified_base 18: mod_base = cm
  modified_base 19: mod_base = um
  modified_base 20: mod_base = OTHER; note = 2-O-methylribose adenine
  modified_base 21: mod_base = gm
  modified_base 21..22: mod_base = OTHER; note = S-phosphorothioate
  modified_base 22: mod_base = um
  modified_base 22..23: mod_base = OTHER; note = S-phosphorothioate
  modified_base 23: mod_base = um
  source 1..23: mol_type = other RNA
tgtgatccaaaaatgtcctagtt

SEQ ID NO: 933 - RNA, 23 nt, synthetic construct
  misc_feature 1..23: note = Synthetic: WV-45023
  misc_feature 1..23: note = Synthetic: SSR-0105004
  modified_base 1: mod_base = um
  modified_base 1..2: mod_base = OTHER; note = R-phosphorothioate
  modified_base 2: mod_base = OTHER; note = 2-fluororibose guanine
  modified_base 2..3: mod_base = OTHER; note = S-phosphorothioate
  modified_base 3: mod_base = um
  modified_base 4: mod_base = gm
  modified_base 5: mod_base = OTHER; note = 2-O-methylribose adenine
  modified_base 6: mod_base = OTHER; note = 2-fluororibose uracil
  modified_base 7: mod_base = cm
  modified_base 8: mod_base = cm
  modified_base 9: mod_base = OTHER; note = 2-O-methylribose adenine
  modified_base 10: mod_base = OTHER; note = 2-O-methylribose adenine
  modified_base 11: mod_base = OTHER; note = 2-O-methylribose adenine
  modified_base 12: mod_base = OTHER; note = 2-O-methylribose adenine
  modified_base 13: mod_base = OTHER; note = 2-O-methylribose adenine
  modified_base 14: mod_base = OTHER; note = 2-fluororibose uracil
  modified_base 15: mod_base = gm
  modified_base 16: mod_base = OTHER; note = 2-fluororibose uracil
  modified_base 17: mod_base = cm
  modified_base 18: mod_base = cm
  modified_base 19: mod_base = um
  modified_base 20: mod_base = OTHER; note = 2-O-methylribose adenine
  modified_base 21: mod_base = gm
  modified_base 21..22: mod_base = OTHER; note = S-phosphorothioate
  modified_base 22: mod_base = um
  modified_base 22..23: mod_base = OTHER; note R-N-(1,3-dimethylimidazolidin-2-ylidene)phosphoramidate
  modified_base 23: mod_base = um
  source 1..23: mol_type = other RNA
tgtgatccaaaaatgtcctagtt

SEQ ID NO: 934 - RNA, 23 nt, synthetic construct
  misc_feature 1..23: note = Synthetic: WV-45024
  misc_feature 1..23: note = Synthetic: SSR-0105049
  modified_base 1: mod_base = um
  modified_base 1..2: mod_base = OTHER; note = S-phosphorothioate
  modified_base 2: mod_base = OTHER; note = 2-fluororibose guanine
  modified_base 2..3: mod_base = OTHER; note = R-phosphorothioate
  modified_base 3: mod_base = um
  modified_base 4: mod_base = gm
  modified_base 5: mod_base = OTHER; note = 2-O-methylribose adenine
  modified_base 6: mod_base = OTHER; note = 2-fluororibose uracil
  modified_base 7: mod_base = cm
  modified_base 8: mod_base = cm
  modified_base 9: mod_base = OTHER; note = 2-O-methylribose adenine
  modified_base 10: mod_base = OTHER; note = 2-O-methylribose adenine
  modified_base 11: mod_base = OTHER; note = 2-O-methylribose adenine
  modified_base 12: mod_base = OTHER; note = 2-O-methylribose adenine
  modified_base 13: mod_base = OTHER; note = 2-O-methylribose adenine
  modified_base 14: mod_base = OTHER; note = 2-fluororibose uracil
  modified_base 15: mod_base = gm
  modified_base 16: mod_base = OTHER; note = 2-fluororibose uracil
  modified_base 17: mod_base = cm
  modified_base 18: mod_base = cm
  modified_base 19: mod_base = um
  modified_base 20: mod_base = OTHER; note = 2-O-methylribose adenine
  modified_base 21: mod_base = gm
  modified_base 21..22: mod_base = OTHER; note = S-phosphorothioate
  modified_base 22: mod_base = um
  modified_base 22..23: mod_base = OTHER; note R-N-(1,3-dimethylimidazolidin-2-ylidene)phosphoramidate
  modified_base 23: mod_base = um
  source 1..23: mol_type = other RNA
tgtgatccaaaaatgtcctagtt

SEQ ID NO: 935 - RNA, 23 nt, synthetic construct
  misc_feature 1..23: note = Synthetic: WV-45025
  misc_feature 1..23: note = Synthetic: SSR-0105005
  modified_base 1: mod_base = um
  modified_base 1..2: mod_base = OTHER; note = R-phosphorothioate
  modified_base 2: mod_base = OTHER; note = 2-fluororibose guanine
  modified_base 2..3: mod_base = OTHER; note = S-phosphorothioate
  modified_base 3: mod_base = um
  modified_base 4: mod_base = gm
  modified_base 5: mod_base = OTHER; note = 2-O-methylribose adenine
  modified_base 6: mod_base = OTHER; note = 2-fluororibose uracil
  modified_base 7: mod_base = cm
  modified_base 8: mod_base = cm
  modified_base 9: mod_base = OTHER; note = 2-O-methylribose adenine
  modified_base 10: mod_base = OTHER; note = 2-O-methylribose adenine
  modified_base 11: mod_base = OTHER; note = 2-O-methylribose adenine
  modified_base 12: mod_base = OTHER; note = 2-O-methylribose adenine
  modified_base 13: mod_base = OTHER; note = 2-O-methylribose adenine
  modified_base 14: mod_base = OTHER; note = 2-fluororibose uracil
  modified_base 15: mod_base = gm
  modified_base 16: mod_base = OTHER; note = 2-fluororibose uracil
  modified_base 17: mod_base = cm
  modified_base 18: mod_base = cm
  modified_base 19: mod_base = um
  modified_base 20: mod_base = OTHER; note = 2-O-methylribose adenine
  modified_base 21: mod_base = gm
  modified_base 21..22: mod_base = OTHER; note = S-phosphorothioate
  modified_base 22: mod_base = um
  modified_base 22..23: mod_base = OTHER; note S-N-(1,3-dimethylimidazolidin-2-ylidene)phosphoramidate
  modified_base 23: mod_base = um
  source 1..23: mol_type = other RNA
tgtgatccaaaaatgtcctagtt

SEQ ID NO: 936 - RNA, 23 nt, synthetic construct
  misc_feature 1..23: note = Synthetic: WV-45026
  misc_feature 1..23: note = Synthetic: SSR-0105050
  modified_base 1: mod_base = um
  modified_base 1..2: mod_base = OTHER; note = S-phosphorothioate
  modified_base 2: mod_base = OTHER; note = 2-fluororibose guanine
  modified_base 2..3: mod_base = OTHER; note = R-phosphorothioate
  modified_base 3: mod_base = um
  modified_base 4: mod_base = gm
  modified_base 5: mod_base = OTHER; note = 2-O-methylribose adenine
  modified_base 6: mod_base = OTHER; note = 2-fluororibose uracil
  modified_base 7: mod_base = cm
  modified_base 8: mod_base = cm
  modified_base 9: mod_base = OTHER; note = 2-O-methylribose adenine
  modified_base 10: mod_base = OTHER; note = 2-O-methylribose adenine
  modified_base 11: mod_base = OTHER; note = 2-O-methylribose adenine
  modified_base 12: mod_base = OTHER; note = 2-O-methylribose adenine
  modified_base 13: mod_base = OTHER; note = 2-O-methylribose adenine
  modified_base 14: mod_base = OTHER; note = 2-fluororibose uracil
  modified_base 15: mod_base = gm
  modified_base 16: mod_base = OTHER; note = 2-fluororibose uracil
  modified_base 17: mod_base = cm
  modified_base 18: mod_base = cm
  modified_base 19: mod_base = um
  modified_base 20: mod_base = OTHER; note = 2-O-methylribose adenine
  modified_base 21: mod_base = gm
  modified_base 21..22: mod_base = OTHER; note = S-phosphorothioate
  modified_base 22: mod_base = um
  modified_base 22..23: mod_base = OTHER; note S-N-(1,3-dimethylimidazolidin-2-ylidene)phosphoramidate
  modified_base 23: mod_base = um
  source 1..23: mol_type = other RNA
tgtgatccaaaaatgtcctagtt

SEQ ID NO: 937 - RNA, 23 nt, synthetic construct
  misc_feature 1..23: note = Synthetic: WV-45027
  misc_feature 1..23: note = Synthetic: SSR-0105006
  modified_base 1: mod_base = um
  modified_base 1..2: mod_base = OTHER; note = R-phosphorothioate
  modified_base 2: mod_base = OTHER; note = 2-fluororibose guanine
  modified_base 2..3: mod_base = OTHER; note = S-phosphorothioate
  modified_base 3: mod_base = um
  modified_base 4: mod_base = gm
  modified_base 5: mod_base = OTHER; note = 2-O-methylribose adenine
  modified_base 6: mod_base = OTHER; note = 2-fluororibose uracil
  modified_base 7: mod_base = cm
  modified_base 8: mod_base = cm
  modified_base 9: mod_base = OTHER; note = 2-O-methylribose adenine
  modified_base 10: mod_base = OTHER; note = 2-O-methylribose adenine
  modified_base 11: mod_base = OTHER; note = 2-O-methylribose adenine
  modified_base 12: mod_base = OTHER; note = 2-O-methylribose adenine
  modified_base 13: mod_base = OTHER; note = 2-O-methylribose adenine
  modified_base 14: mod_base = OTHER; note = 2-fluororibose uracil
  modified_base 15: mod_base = gm
  modified_base 16: mod_base = OTHER; note = 2-fluororibose uracil
  modified_base 17: mod_base = cm
  modified_base 18: mod_base = cm
  modified_base 19: mod_base = um
  modified_base 20: mod_base = OTHER; note = 2-O-methylribose adenine
  modified_base 21: mod_base = gm
  modified_base 22: mod_base = um
  modified_base 22..23: mod_base = OTHER; note R-N-(1,3-dimethylimidazolidin-2-ylidene)phosphoramidate
  modified_base 23: mod_base = um
  source 1..23: mol_type = other RNA
tgtgatccaaaaatgtcctagtt

SEQ ID NO: 938 - RNA, 23 nt, synthetic construct
  misc_feature 1..23: note = Synthetic: WV-45028
  misc_feature 1..23: note = Synthetic: SSR-0105051
  modified_base 1: mod_base = um
  modified_base 1..2: mod_base = OTHER; note = S-phosphorothioate
  modified_base 2: mod_base = OTHER; note = 2-fluororibose guanine
  modified_base 2..3: mod_base = OTHER; note = R-phosphorothioate
  modified_base 3: mod_base = um
  modified_base 4: mod_base = gm
  modified_base 5: mod_base = OTHER; note = 2-O-methylribose adenine
  modified_base 6: mod_base = OTHER; note = 2-fluororibose uracil
  modified_base 7: mod_base = cm
  modified_base 8: mod_base = cm
  modified_base 9: mod_base = OTHER; note = 2-O-methylribose adenine
  modified_base 10: mod_base = OTHER; note = 2-O-methylribose adenine
  modified_base 11: mod_base = OTHER; note = 2-O-methylribose adenine
  modified_base 12: mod_base = OTHER; note = 2-O-methylribose adenine
  modified_base 13: mod_base = OTHER; note = 2-O-methylribose adenine
  modified_base 14: mod_base = OTHER; note = 2-fluororibose uracil
  modified_base 15: mod_base = gm
  modified_base 16: mod_base = OTHER; note = 2-fluororibose uracil
  modified_base 17: mod_base = cm
  modified_base 18: mod_base = cm
  modified_base 19: mod_base = um
  modified_base 20: mod_base = OTHER; note = 2-O-methylribose adenine
  modified_base 21: mod_base = gm
  modified_base 22: mod_base = um
  modified_base 22..23: mod_base = OTHER; note R-N-(1,3-dimethylimidazolidin-2-ylidene)phosphoramidate
  modified_base 23: mod_base = um
  source 1..23: mol_type = other RNA
tgtgatccaaaaatgtcctagtt

SEQ ID NO: 939 - RNA, 23 nt, synthetic construct
  misc_feature 1..23: note = Synthetic: WV-45029
  misc_feature 1..23: note = Synthetic: SSR-0105007
  modified_base 1: mod_base = um
  modified_base 1..2: mod_base = OTHER; note = R-phosphorothioate
  modified_base 2: mod_base = OTHER; note = 2-fluororibose guanine
  modified_base 2..3: mod_base = OTHER; note = S-phosphorothioate
  modified_base 3: mod_base = um
  modified_base 4: mod_base = gm
  modified_base 5: mod_base = OTHER; note = 2-O-methylribose adenine
  modified_base 6: mod_base = OTHER; note = 2-fluororibose uracil
  modified_base 7: mod_base = cm
  modified_base 8: mod_base = cm
  modified_base 9: mod_base = OTHER; note = 2-O-methylribose adenine
  modified_base 10: mod_base = OTHER; note = 2-O-methylribose adenine
  modified_base 11: mod_base = OTHER; note = 2-O-methylribose adenine
  modified_base 12: mod_base = OTHER; note = 2-O-methylribose adenine
  modified_base 13: mod_base = OTHER; note = 2-O-methylribose adenine
  modified_base 14: mod_base = OTHER; note = 2-fluororibose uracil
  modified_base 15: mod_base = gm
  modified_base 16: mod_base = OTHER; note = 2-fluororibose uracil
  modified_base 17: mod_base = cm
  modified_base 18: mod_base = cm
  modified_base 19: mod_base = um
  modified_base 20: mod_base = OTHER; note = 2-O-methylribose adenine
  modified_base 21: mod_base = gm
  modified_base 22: mod_base = um
  modified_base 22..23: mod_base = OTHER; note S-N-(1,3-dimethylimidazolidin-2-ylidene)phosphoramidate
  modified_base 23: mod_base = um
  source 1..23: mol_type = other RNA
tgtgatccaaaaatgtcctagtt

SEQ ID NO: 940 - RNA, 23 nt, synthetic construct
  misc_feature 1..23: note = Synthetic: WV-45030
  misc_feature 1..23: note = Synthetic: SSR-0105052
  modified_base 1: mod_base = um
  modified_base 1..2: mod_base = OTHER; note = S-phosphorothioate
  modified_base 2: mod_base = OTHER; note = 2-fluororibose guanine
  modified_base 2..3: mod_base = OTHER; note = R-phosphorothioate
  modified_base 3: mod_base = um
  modified_base 4: mod_base = gm
  modified_base 5: mod_base = OTHER; note = 2-O-methylribose adenine
  modified_base 6: mod_base = OTHER; note = 2-fluororibose uracil
  modified_base 7: mod_base = cm
  modified_base 8: mod_base = cm
  modified_base 9: mod_base = OTHER; note = 2-O-methylribose adenine
  modified_base 10: mod_base = OTHER; note = 2-O-methylribose adenine
  modified_base 11: mod_base = OTHER; note = 2-O-methylribose adenine
  modified_base 12: mod_base = OTHER; note = 2-O-methylribose adenine
  modified_base 13: mod_base = OTHER; note = 2-O-methylribose adenine
  modified_base 14: mod_base = OTHER; note = 2-fluororibose uracil
  modified_base 15: mod_base = gm
  modified_base 16: mod_base = OTHER; note = 2-fluororibose uracil
  modified_base 17: mod_base = cm
  modified_base 18: mod_base = cm
  modified_base 19: mod_base = um
  modified_base 20: mod_base = OTHER; note = 2-O-methylribose adenine
  modified_base 21: mod_base = gm
  modified_base 22: mod_base = um
  modified_base 22..23: mod_base = OTHER; note S-N-(1,3-dimethylimidazolidin-2-ylidene)phosphoramidate
  modified_base 23: mod_base = um
  source 1..23: mol_type = other RNA
tgtgatccaaaaatgtcctagtt

SEQ ID NO: 941 - RNA, 23 nt, synthetic construct
  misc_feature 1..23: note = Synthetic: WV-45031
  misc_feature 1..23: note = Synthetic: SSR-0104995
  modified_base 1: mod_base = um
  modified_base 1..2: mod_base = OTHER; note = R-phosphorothioate
  modified_base 2: mod_base = OTHER; note = 2-fluororibose guanine
  modified_base 2..3: mod_base = OTHER; note = S-phosphorothioate
  modified_base 3: mod_base = um
  modified_base 4: mod_base = gm
  modified_base 5: mod_base = OTHER; note = 2-O-methylribose adenine
  modified_base 6: mod_base = OTHER; note = 2-fluororibose uracil
  modified_base 7: mod_base = cm
  modified_base 8: mod_base = OTHER; note = 2-fluororibose cytosine
  modified_base 9: mod_base = OTHER; note = 2-O-methylribose adenine
  modified_base 10: mod_base = OTHER; note = 2-O-methylribose adenine
  modified_base 11: mod_base = OTHER; note = 2-O-methylribose adenine
  modified_base 12: mod_base = OTHER; note = 2-fluororibose adenine
  modified_base 13: mod_base = OTHER; note = 2-O-methylribose adenine
  modified_base 14: mod_base = OTHER; note = 2-fluororibose uracil
  modified_base 15: mod_base = gm
  modified_base 16: mod_base = OTHER; note = 2-fluororibose uracil
  modified_base 17: mod_base = cm
  modified_base 18: mod_base = cm
  modified_base 19: mod_base = um
  modified_base 20: mod_base = OTHER; note = 2-O-methylribose adenine
  modified_base 21: mod_base = gm
  modified_base 21..22: mod_base = OTHER; note = S-phosphorothioate
  modified_base 22: mod_base = um
  modified_base 22..23: mod_base = OTHER; note = S-phosphorothioate
  modified_base 23: mod_base = um
  source 1..23: mol_type = other RNA
tgtgatccaaaaatgtcctagtt

SEQ ID NO: 942 - RNA, 23 nt, synthetic construct
  misc_feature 1..23: note = Synthetic: WV-45032
  misc_feature 1..23: note = Synthetic: SSR-0105040
  modified_base 1: mod_base = um
  modified_base 1..2: mod_base = OTHER; note = S-phosphorothioate
  modified_base 2: mod_base = OTHER; note = 2-fluororibose guanine
  modified_base 2..3: mod_base = OTHER; note = R-phosphorothioate
  modified_base 3: mod_base = um
  modified_base 4: mod_base = gm
  modified_base 5: mod_base = OTHER; note = 2-O-methylribose adenine
  modified_base 6: mod_base = OTHER; note = 2-fluororibose uracil
  modified_base 7: mod_base = cm
  modified_base 8: mod_base = OTHER; note = 2-fluororibose cytosine
  modified_base 9: mod_base = OTHER; note = 2-O-methylribose adenine
  modified_base 10: mod_base = OTHER; note = 2-O-methylribose adenine
  modified_base 11: mod_base = OTHER; note = 2-O-methylribose adenine
  modified_base 12: mod_base = OTHER; note = 2-fluororibose adenine
  modified_base 13: mod_base = OTHER; note = 2-O-methylribose adenine
  modified_base 14: mod_base = OTHER; note = 2-fluororibose uracil
  modified_base 15: mod_base = gm
  modified_base 16: mod_base = OTHER; note = 2-fluororibose uracil
  modified_base 17: mod_base = cm
  modified_base 18: mod_base = cm
  modified_base 19: mod_base = um
  modified_base 20: mod_base = OTHER; note = 2-O-methylribose adenine
  modified_base 21: mod_base = gm
  modified_base 21..22: mod_base = OTHER; note = S-phosphorothioate
  modified_base 22: mod_base = um
  modified_base 22..23: mod_base = OTHER; note = S-phosphorothioate
  modified_base 23: mod_base = um
  source 1..23: mol_type = other RNA
tgtgatccaaaaatgtcctagtt

SEQ ID NO: 943 - RNA, 23 nt, synthetic construct
  misc_feature 1..23: note = Synthetic: WV-45033
  misc_feature 1..23: note = Synthetic: SSR-0104996
  modified_base 1: mod_base = um
  modified_base 1..2: mod_base = OTHER; note = R-phosphorothioate
  modified_base 2: mod_base = OTHER; note = 2-fluororibose guanine
  modified_base 2..3: mod_base = OTHER; note = S-phosphorothioate
  modified_base 3: mod_base = um
  modified_base 4: mod_base = gm
  modified_base 5: mod_base = OTHER; note = 2-O-methylribose adenine
  modified_base 6: mod_base = OTHER; note = 2-fluororibose uracil
  modified_base 7: mod_base = cm
  modified_base 8: mod_base = OTHER; note = 2-fluororibose cytosine
  modified_base 9: mod_base = OTHER; note = 2-O-methylribose adenine
  modified_base 10: mod_base = OTHER; note = 2-O-methylribose adenine
  modified_base 11: mod_base = OTHER; note = 2-O-methylribose adenine
  modified_base 12: mod_base = OTHER; note = 2-fluororibose adenine
  modified_base 13: mod_base = OTHER; note = 2-O-methylribose adenine
  modified_base 14: mod_base = OTHER; note = 2-fluororibose uracil
  modified_base 15: mod_base = gm
  modified_base 16: mod_base = OTHER; note = 2-fluororibose uracil
  modified_base 17: mod_base = cm
  modified_base 18: mod_base = cm
  modified_base 19: mod_base = um
  modified_base 20: mod_base = OTHER; note = 2-O-methylribose adenine
  modified_base 21: mod_base = gm
  modified_base 21..22: mod_base = OTHER; note = S-phosphorothioate
  modified_base 22: mod_base = um
  modified_base 22..23: mod_base = OTHER; note R-N-(1,3-dimethylimidazolidin-2-ylidene)phosphoramidate
  modified_base 23: mod_base = um
  source 1..23: mol_type = other RNA
tgtgatccaaaaatgtcctagtt

SEQ ID NO: 944 - RNA, 23 nt, synthetic construct
  misc_feature 1..23: note = Synthetic: WV-45034
  misc_feature 1..23: note = Synthetic: SSR-0105041
  modified_base 1: mod_base = um
  modified_base 1..2: mod_base = OTHER; note = S-phosphorothioate
  modified_base 2: mod_base = OTHER; note = 2-fluororibose guanine
  modified_base 2..3: mod_base = OTHER; note = R-phosphorothioate
  modified_base 3: mod_base = um
  modified_base 4: mod_base = gm
  modified_base 5: mod_base = OTHER; note = 2-O-methylribose adenine
  modified_base 6: mod_base = OTHER; note = 2-fluororibose uracil
  modified_base 7: mod_base = cm
  modified_base 8: mod_base = OTHER; note = 2-fluororibose cytosine
  modified_base 9: mod_base = OTHER; note = 2-O-methylribose adenine
  modified_base 10: mod_base = OTHER; note = 2-O-methylribose adenine
  modified_base 11: mod_base = OTHER; note = 2-O-methylribose adenine
  modified_base 12: mod_base = OTHER; note = 2-fluororibose adenine
  modified_base 13: mod_base = OTHER; note = 2-O-methylribose adenine
  modified_base 14: mod_base = OTHER; note = 2-fluororibose uracil
  modified_base 15: mod_base = gm
  modified_base 16: mod_base = OTHER; note = 2-fluororibose uracil
  modified_base 17: mod_base = cm
  modified_base 18: mod_base = cm
  modified_base 19: mod_base = um
  modified_base 20: mod_base = OTHER; note = 2-O-methylribose adenine
  modified_base 21: mod_base = gm
  modified_base 21..22: mod_base = OTHER; note = S-phosphorothioate
  modified_base 22: mod_base = um
  modified_base 22..23: mod_base = OTHER; note R-N-(1,3-dimethylimidazolidin-2-ylidene)phosphoramidate
  modified_base 23: mod_base = um
  source 1..23: mol_type = other RNA
tgtgatccaaaaatgtcctagtt

SEQ ID NO: 945 - RNA, 23 nt, synthetic construct
  misc_feature 1..23: note = Synthetic: WV-45035
  misc_feature 1..23: note = Synthetic: SSR-0104997
  modified_base 1: mod_base = um
  modified_base 1..2: mod_base = OTHER; note = R-phosphorothioate
  modified_base 2: mod_base = OTHER; note = 2-fluororibose guanine
  modified_base 2..3: mod_base = OTHER; note = S-phosphorothioate
  modified_base 3: mod_base = um
  modified_base 4: mod_base = gm
  modified_base 5: mod_base = OTHER; note = 2-O-methylribose adenine
  modified_base 6: mod_base = OTHER; note = 2-fluororibose uracil
  modified_base 7: mod_base = cm
  modified_base 8: mod_base = OTHER; note = 2-fluororibose cytosine
  modified_base 9: mod_base = OTHER; note = 2-O-methylribose adenine
  modified_base 10: mod_base = OTHER; note = 2-O-methylribose adenine
  modified_base 11: mod_base = OTHER; note = 2-O-methylribose adenine
  modified_base 12: mod_base = OTHER; note = 2-fluororibose adenine
  modified_base 13: mod_base = OTHER; note = 2-O-methylribose adenine
  modified_base 14: mod_base = OTHER; note = 2-fluororibose uracil
  modified_base 15: mod_base = gm
  modified_base 16: mod_base = OTHER; note = 2-fluororibose uracil
  modified_base 17: mod_base = cm
  modified_base 18: mod_base = cm
  modified_base 19: mod_base = um
  modified_base 20: mod_base = OTHER; note = 2-O-methylribose adenine
  modified_base 21: mod_base = gm
  modified_base 21..22: mod_base = OTHER; note = S-phosphorothioate
  modified_base 22: mod_base = um
  modified_base 22..23: mod_base = OTHER; note S-N-(1,3-dimethylimidazolidin-2-ylidene)phosphoramidate
  modified_base 23: mod_base = um
  source 1..23: mol_type = other RNA
tgtgatccaaaaatgtcctagtt

SEQ ID NO: 946 - RNA, 23 nt, synthetic construct
  misc_feature 1..23: note = Synthetic: WV-45036
  misc_feature 1..23: note = Synthetic: SSR-0105042
  modified_base 1: mod_base = um
  modified_base 1..2: mod_base = OTHER; note = S-phosphorothioate
  modified_base 2: mod_base = OTHER; note = 2-fluororibose guanine
  modified_base 2..3: mod_base = OTHER; note = R-phosphorothioate
  modified_base 3: mod_base = um
  modified_base 4: mod_base = gm
  modified_base 5: mod_base = OTHER; note = 2-O-methylribose adenine
  modified_base 6: mod_base = OTHER; note = 2-fluororibose uracil
  modified_base 7: mod_base = cm
  modified_base 8: mod_base = OTHER; note = 2-fluororibose cytosine
  modified_base 9: mod_base = OTHER; note = 2-O-methylribose adenine
  modified_base 10: mod_base = OTHER; note = 2-O-methylribose adenine
  modified_base 11: mod_base = OTHER; note = 2-O-methylribose adenine
  modified_base 12: mod_base = OTHER; note = 2-fluororibose adenine
  modified_base 13: mod_base = OTHER; note = 2-O-methylribose adenine
  modified_base 14: mod_base = OTHER; note = 2-fluororibose uracil
  modified_base 15: mod_base = gm
  modified_base 16: mod_base = OTHER; note = 2-fluororibose uracil
  modified_base 17: mod_base = cm
  modified_base 18: mod_base = cm
  modified_base 19: mod_base = um
  modified_base 20: mod_base = OTHER; note = 2-O-methylribose adenine
  modified_base 21: mod_base = gm
  modified_base 21..22: mod_base = OTHER; note = S-phosphorothioate
  modified_base 22: mod_base = um
  modified_base 22..23: mod_base = OTHER; note S-N-(1,3-dimethylimidazolidin-2-ylidene)phosphoramidate
  modified_base 23: mod_base = um
  source 1..23: mol_type = other RNA
tgtgatccaaaaatgtcctagtt

SEQ ID NO: 947 - RNA, 23 nt, synthetic construct
  misc_feature 1..23: note = Synthetic: WV-45037
  misc_feature 1..23: note = Synthetic: SSR-0104998
  modified_base 1: mod_base = um
  modified_base 1..2: mod_base = OTHER; note = R-phosphorothioate
  modified_base 2: mod_base = OTHER; note = 2-fluororibose guanine
  modified_base 2..3: mod_base = OTHER; note = S-phosphorothioate
  modified_base 3: mod_base = um
  modified_base 4: mod_base = gm
  modified_base 5: mod_base = OTHER; note = 2-O-methylribose adenine
  modified_base 6: mod_base = OTHER; note = 2-fluororibose uracil
  modified_base 7: mod_base = cm
  modified_base 8: mod_base = OTHER; note = 2-fluororibose cytosine
  modified_base 9: mod_base = OTHER; note = 2-O-methylribose adenine
  modified_base 10: mod_base = OTHER; note = 2-O-methylribose adenine
  modified_base 11: mod_base = OTHER; note = 2-O-methylribose adenine
  modified_base 12: mod_base = OTHER; note = 2-fluororibose adenine
  modified_base 13: mod_base = OTHER; note = 2-O-methylribose adenine
  modified_base 14: mod_base = OTHER; note = 2-fluororibose uracil
  modified_base 15: mod_base = gm
  modified_base 16: mod_base = OTHER; note = 2-fluororibose uracil
  modified_base 17: mod_base = cm
  modified_base 18: mod_base = cm
  modified_base 19: mod_base = um
  modified_base 20: mod_base = OTHER; note = 2-O-methylribose adenine
  modified_base 21: mod_base = gm
  modified_base 22: mod_base = um
  modified_base 22..23: mod_base = OTHER; note R-N-(1,3-dimethylimidazolidin-2-ylidene)phosphoramidate
  modified_base 23: mod_base = um
  source 1..23: mol_type = other RNA
tgtgatccaaaaatgtcctagtt

SEQ ID NO: 948 - RNA, 23 nt, synthetic construct
  misc_feature 1..23: note = Synthetic: WV-45038
  misc_feature 1..23: note = Synthetic: SSR-0105043
  modified_base 1: mod_base = um
  modified_base 1..2: mod_base = OTHER; note = S-phosphorothioate
  modified_base 2: mod_base = OTHER; note = 2-fluororibose guanine
  modified_base 2..3: mod_base = OTHER; note = R-phosphorothioate
  modified_base 3: mod_base = um
  modified_base 4: mod_base = gm
  modified_base 5: mod_base = OTHER; note = 2-O-methylribose adenine
  modified_base 6: mod_base = OTHER; note = 2-fluororibose uracil
  modified_base 7: mod_base = cm
  modified_base 8: mod_base = OTHER; note = 2-fluororibose cytosine
  modified_base 9: mod_base = OTHER; note = 2-O-methylribose adenine
  modified_base 10: mod_base = OTHER; note = 2-O-methylribose adenine
  modified_base 11: mod_base = OTHER; note = 2-O-methylribose adenine
  modified_base 12: mod_base = OTHER; note = 2-fluororibose adenine
  modified_base 13: mod_base = OTHER; note = 2-O-methylribose adenine
  modified_base 14: mod_base = OTHER; note = 2-fluororibose uracil
  modified_base 15: mod_base = gm
  modified_base 16: mod_base = OTHER; note = 2-fluororibose uracil
  modified_base 17: mod_base = cm
  modified_base 18: mod_base = cm
  modified_base 19: mod_base = um
  modified_base 20: mod_base = OTHER; note = 2-O-methylribose adenine
  modified_base 21: mod_base = gm
  modified_base 22: mod_base = um
  modified_base 22..23: mod_base = OTHER; note R-N-(1,3-dimethylimidazolidin-2-ylidene)phosphoramidate
  modified_base 23: mod_base = um
  source 1..23: mol_type = other RNA
tgtgatccaaaaatgtcctagtt

SEQ ID NO: 949 - RNA, 23 nt, synthetic construct
  misc_feature 1..23: note = Synthetic: WV-45039
  misc_feature 1..23: note = Synthetic: SSR-0104999
  modified_base 1: mod_base = um
  modified_base 1..2: mod_base = OTHER; note = R-phosphorothioate
  modified_base 2: mod_base = OTHER; note = 2-fluororibose guanine
  modified_base 2..3: mod_base = OTHER; note = S-phosphorothioate
  modified_base 3: mod_base = um
  modified_base 4: mod_base = gm
  modified_base 5: mod_base = OTHER; note = 2-O-methylribose adenine
  modified_base 6: mod_base = OTHER; note = 2-fluororibose uracil
  modified_base 7: mod_base = cm
  modified_base 8: mod_base = OTHER; note = 2-fluororibose cytosine
  modified_base 9: mod_base = OTHER; note = 2-O-methylribose adenine
  modified_base 10: mod_base = OTHER; note = 2-O-methylribose adenine
  modified_base 11: mod_base = OTHER; note = 2-O-methylribose adenine
  modified_base 12: mod_base = OTHER; note = 2-fluororibose adenine
  modified_base 13: mod_base = OTHER; note = 2-O-methylribose adenine
  modified_base 14: mod_base = OTHER; note = 2-fluororibose uracil
  modified_base 15: mod_base = gm
  modified_base 16: mod_base = OTHER; note = 2-fluororibose uracil
  modified_base 17: mod_base = cm
  modified_base 18: mod_base = cm
  modified_base 19: mod_base = um
  modified_base 20: mod_base = OTHER; note = 2-O-methylribose adenine
  modified_base 21: mod_base = gm
  modified_base 22: mod_base = um
  modified_base 22..23: mod_base = OTHER; note S-N-(1,3-dimethylimidazolidin-2-ylidene)phosphoramidate
  modified_base 23: mod_base = um
  source 1..23: mol_type = other RNA
tgtgatccaaaaatgtcctagtt

SEQ ID NO: 950 - RNA, 23 nt, synthetic construct
  misc_feature 1..23: note = Synthetic: WV-45040
  misc_feature 1..23: note = Synthetic: SSR-0105044
  modified_base 1: mod_base = um
  modified_base 1..2: mod_base = OTHER; note = S-phosphorothioate
  modified_base 2: mod_base = OTHER; note = 2-fluororibose guanine
  modified_base 2..3: mod_base = OTHER; note = R-phosphorothioate
  modified_base 3: mod_base = um
  modified_base 4: mod_base = gm
  modified_base 5: mod_base = OTHER; note = 2-O-methylribose adenine
  modified_base 6: mod_base = OTHER; note = 2-fluororibose uracil
  modified_base 7: mod_base = cm
  modified_base 8: mod_base = OTHER; note = 2-fluororibose cytosine
  modified_base 9: mod_base = OTHER; note = 2-O-methylribose adenine
  modified_base 10: mod_base = OTHER; note = 2-O-methylribose adenine
  modified_base 11: mod_base = OTHER; note = 2-O-methylribose adenine
  modified_base 12: mod_base = OTHER; note = 2-fluororibose adenine
  modified_base 13: mod_base = OTHER; note = 2-O-methylribose adenine
  modified_base 14: mod_base = OTHER; note = 2-fluororibose uracil
  modified_base 15: mod_base = gm
  modified_base 16: mod_base = OTHER; note = 2-fluororibose uracil
  modified_base 17: mod_base = cm
  modified_base 18: mod_base = cm
  modified_base 19: mod_base = um
  modified_base 20: mod_base = OTHER; note = 2-O-methylribose adenine
  modified_base 21: mod_base = gm
  modified_base 22: mod_base = um
  modified_base 22..23: mod_base = OTHER; note S-N-(1,3-dimethylimidazolidin-2-ylidene)phosphoramidate
  modified_base 23: mod_base = um
  source 1..23: mol_type = other RNA
tgtgatccaaaaatgtcctagtt

SEQ ID NO: 951 - RNA, 23 nt, synthetic construct
  misc_feature 1..23: note = Synthetic: WV-45041
  misc_feature 1..23: note = Synthetic: SSR-0104986
  modified_base 1: mod_base = um
  modified_base 1..2: mod_base = OTHER; note = R-phosphorothioate
  modified_base 2: mod_base = OTHER; note = 2-fluororibose guanine
  modified_base 2..3: mod_base = OTHER; note = S-phosphorothioate
  modified_base 3: mod_base = OTHER; note = 2-O-methylribose adenine
  modified_base 4: mod_base = cm
  modified_base 5: mod_base = OTHER; note = 2-O-methylribose adenine
  modified_base 6: mod_base = OTHER; note = 2-fluororibose uracil
  modified_base 7: mod_base = gm
  modified_base 8: mod_base = OTHER; note = 2-O-methylribose adenine
  modified_base 9: mod_base = gm
  modified_base 10: mod_base = gm
  modified_base 11: mod_base = um
  modified_base 12: mod_base = um
  modified_base 13: mod_base = um
  modified_base 14: mod_base = OTHER; note = 2-fluororibose uracil
  modified_base 15: mod_base = gm
  modified_base 16: mod_base = OTHER; note = 2-fluororibose adenine
  modified_base 17: mod_base = um
  modified_base 18: mod_base = OTHER; note = 2-O-methylribose adenine
  modified_base 19: mod_base = cm
  modified_base 20: mod_base = cm
  modified_base 21: mod_base = OTHER; note = 2-O-methylribose adenine
  modified_base 21..22: mod_base = OTHER; note = S-phosphorothioate
  modified_base 22: mod_base = um
  modified_base 22..23: mod_base = OTHER; note = S-phosphorothioate
  modified_base 23: mod_base = um
  source 1..23: mol_type = other RNA
tgacatgaggttttgataccatt

SEQ ID NO: 952 - RNA, 23 nt, synthetic construct
  misc_feature 1..23: note = Synthetic: WV-45042
  misc_feature 1..23: note = Synthetic: SSR-0105027
  modified_base 1: mod_base = um
  modified_base 1..2: mod_base = OTHER; note = S-phosphorothioate
  modified_base 2: mod_base = OTHER; note = 2-fluororibose guanine
  modified_base 2..3: mod_base = OTHER; note = R-phosphorothioate
  modified_base 3: mod_base = OTHER; note = 2-O-methylribose adenine
  modified_base 4: mod_base = cm
  modified_base 5: mod_base = OTHER; note = 2-O-methylribose adenine
  modified_base 6: mod_base = OTHER; note = 2-fluororibose uracil
  modified_base 7: mod_base = gm
  modified_base 8: mod_base = OTHER; note = 2-O-methylribose adenine
  modified_base 9: mod_base = gm
  modified_base 10: mod_base = gm
  modified_base 11: mod_base = um
  modified_base 12: mod_base = um
  modified_base 13: mod_base = um
  modified_base 14: mod_base = OTHER; note = 2-fluororibose uracil
  modified_base 15: mod_base = gm
  modified_base 16: mod_base = OTHER; note = 2-fluororibose adenine
  modified_base 17: mod_base = um
  modified_base 18: mod_base = OTHER; note = 2-O-methylribose adenine
  modified_base 19: mod_base = cm
  modified_base 20: mod_base = cm
  modified_base 21: mod_base = OTHER; note = 2-O-methylribose adenine
  modified_base 21..22: mod_base = OTHER; note = S-phosphorothioate
  modified_base 22: mod_base = um
  modified_base 22..23: mod_base = OTHER; note = S-phosphorothioate
  modified_base 23: mod_base = um
  source 1..23: mol_type = other RNA
tgacatgaggttttgataccatt

SEQ ID NO: 953 - RNA, 23 nt, synthetic construct
  misc_feature 1..23: note = Synthetic: WV-45043
  misc_feature 1..23: note = Synthetic: SSR-0104987
  modified_base 1: mod_base = um
  modified_base 1..2: mod_base = OTHER; note = R-phosphorothioate
  modified_base 2: mod_base = OTHER; note = 2-fluororibose guanine
  modified_base 2..3: mod_base = OTHER; note = S-phosphorothioate
  modified_base 3: mod_base = OTHER; note = 2-O-methylribose adenine
  modified_base 4: mod_base = cm
  modified_base 5: mod_base = OTHER; note = 2-O-methylribose adenine
  modified_base 6: mod_base = OTHER; note = 2-fluororibose uracil
  modified_base 7: mod_base = gm
  modified_base 8: mod_base = OTHER; note = 2-O-methylribose adenine
  modified_base 9: mod_base = gm
  modified_base 10: mod_base = gm
  modified_base 11: mod_base = um
  modified_base 12: mod_base = um
  modified_base 13: mod_base = um
  modified_base 14: mod_base = OTHER; note = 2-fluororibose uracil
  modified_base 15: mod_base = gm
  modified_base 16: mod_base = OTHER; note = 2-fluororibose adenine
  modified_base 17: mod_base = um
  modified_base 18: mod_base = OTHER; note = 2-O-methylribose adenine
  modified_base 19: mod_base = cm
  modified_base 20: mod_base = cm
  modified_base 21: mod_base = OTHER; note = 2-O-methylribose adenine
  modified_base 21..22: mod_base = OTHER; note = S-phosphorothioate
  modified_base 22: mod_base = um
  modified_base 22..23: mod_base = OTHER; note R-N-(1,3-dimethylimidazolidin-2-ylidene)phosphoramidate
  modified_base 23: mod_base = um
  source 1..23: mol_type = other RNA
tgacatgaggttttgataccatt

SEQ ID NO: 954 - RNA, 23 nt, synthetic construct
  misc_feature 1..23: note = Synthetic: WV-45044
  misc_feature 1..23: note = Synthetic: SSR-0105028
  modified_base 1: mod_base = um
  modified_base 1..2: mod_base = OTHER; note = S-phosphorothioate
  modified_base 2: mod_base = OTHER; note = 2-fluororibose guanine
  modified_base 2..3: mod_base = OTHER; note = R-phosphorothioate
  modified_base 3: mod_base = OTHER; note = 2-O-methylribose adenine
  modified_base 4: mod_base = cm
  modified_base 5: mod_base = OTHER; note = 2-O-methylribose adenine
  modified_base 6: mod_base = OTHER; note = 2-fluororibose uracil
  modified_base 7: mod_base = gm
  modified_base 8: mod_base = OTHER; note = 2-O-methylribose adenine
  modified_base 9: mod_base = gm
  modified_base 10: mod_base = gm
  modified_base 11: mod_base = um
  modified_base 12: mod_base = um
  modified_base 13: mod_base = um
  modified_base 14: mod_base = OTHER; note = 2-fluororibose uracil
  modified_base 15: mod_base = gm
  modified_base 16: mod_base = OTHER; note = 2-fluororibose adenine
  modified_base 17: mod_base = um
  modified_base 18: mod_base = OTHER; note = 2-O-methylribose adenine
  modified_base 19: mod_base = cm
  modified_base 20: mod_base = cm
  modified_base 21: mod_base = OTHER; note = 2-O-methylribose adenine
  modified_base 21..22: mod_base = OTHER; note = S-phosphorothioate
  modified_base 22: mod_base = um
  modified_base 22..23: mod_base = OTHER; note R-N-(1,3-dimethylimidazolidin-2-ylidene)phosphoramidate
  modified_base 23: mod_base = um
  source 1..23: mol_type = other RNA
tgacatgaggttttgataccatt

SEQ ID NO: 955 - RNA, 23 nt, synthetic construct
  misc_feature 1..23: note = Synthetic: WV-45045
  misc_feature 1..23: note = Synthetic: SSR-0104988
  modified_base 1: mod_base = um
  modified_base 1..2: mod_base = OTHER; note = R-phosphorothioate
  modified_base 2: mod_base = OTHER; note = 2-fluororibose guanine
  modified_base 2..3: mod_base = OTHER; note = S-phosphorothioate
  modified_base 3: mod_base = OTHER; note = 2-O-methylribose adenine
  modified_base 4: mod_base = cm
  modified_base 5: mod_base = OTHER; note = 2-O-methylribose adenine
  modified_base 6: mod_base = OTHER; note = 2-fluororibose uracil
  modified_base 7: mod_base = gm
  modified_base 8: mod_base = OTHER; note = 2-O-methylribose adenine
  modified_base 9: mod_base = gm
  modified_base 10: mod_base = gm
  modified_base 11: mod_base = um
  modified_base 12: mod_base = um
  modified_base 13: mod_base = um
  modified_base 14: mod_base = OTHER; note = 2-fluororibose uracil
  modified_base 15: mod_base = gm
  modified_base 16: mod_base = OTHER; note = 2-fluororibose adenine
  modified_base 17: mod_base = um
  modified_base 18: mod_base = OTHER; note = 2-O-methylribose adenine
  modified_base 19: mod_base = cm
  modified_base 20: mod_base = cm
  modified_base 21: mod_base = OTHER; note = 2-O-methylribose adenine
  modified_base 21..22: mod_base = OTHER; note = S-phosphorothioate
  modified_base 22: mod_base = um
  modified_base 22..23: mod_base = OTHER; note S-N-(1,3-dimethylimidazolidin-2-ylidene)phosphoramidate
  modified_base 23: mod_base = um
  source 1..23: mol_type = other RNA
tgacatgaggttttgataccatt

SEQ ID NO: 956 - RNA, 23 nt, synthetic construct
  misc_feature 1..23: note = Synthetic: WV-45046
  misc_feature 1..23: note = Synthetic: SSR-0105029
  modified_base 1: mod_base = um
  modified_base 1..2: mod_base = OTHER; note = S-phosphorothioate
  modified_base 2: mod_base = OTHER; note = 2-fluororibose guanine
  modified_base 2..3: mod_base = OTHER; note = R-phosphorothioate
  modified_base 3: mod_base = OTHER; note = 2-O-methylribose adenine
  modified_base 4: mod_base = cm
  modified_base 5: mod_base = OTHER; note = 2-O-methylribose adenine
  modified_base 6: mod_base = OTHER; note = 2-fluororibose uracil
  modified_base 7: mod_base = gm
  modified_base 8: mod_base = OTHER; note = 2-O-methylribose adenine
  modified_base 9: mod_base = gm
  modified_base 10: mod_base = gm
  modified_base 11: mod_base = um
  modified_base 12: mod_base = um
  modified_base 13: mod_base = um
  modified_base 14: mod_base = OTHER; note = 2-fluororibose uracil
  modified_base 15: mod_base = gm
  modified_base 16: mod_base = OTHER; note = 2-fluororibose adenine
  modified_base 17: mod_base = um
  modified_base 18: mod_base = OTHER; note = 2-O-methylribose adenine
  modified_base 19: mod_base = cm
  modified_base 20: mod_base = cm
  modified_base 21: mod_base = OTHER; note = 2-O-methylribose adenine
  modified_base 21..22: mod_base = OTHER; note = S-phosphorothioate
  modified_base 22: mod_base = um
  modified_base 22..23: mod_base = OTHER; note S-N-(1,3-dimethylimidazolidin-2-ylidene)phosphoramidate
  modified_base 23: mod_base = um
  source 1..23: mol_type = other RNA
tgacatgaggttttgataccatt

SEQ ID NO: 957 - RNA, 23 nt, synthetic construct
  misc_feature 1..23: note = Synthetic: WV-45047
  misc_feature 1..23: note = Synthetic: SSR-0104989
  modified_base 1: mod_base = um
  modified_base 1..2: mod_base = OTHER; note = R-phosphorothioate
  modified_base 2: mod_base = OTHER; note = 2-fluororibose guanine
  modified_base 2..3: mod_base = OTHER; note = S-phosphorothioate
  modified_base 3: mod_base = OTHER; note = 2-O-methylribose adenine
  modified_base 4: mod_base = cm
  modified_base 5: mod_base = OTHER; note = 2-O-methylribose adenine
  modified_base 6: mod_base = OTHER; note = 2-fluororibose uracil
  modified_base 7: mod_base = gm
  modified_base 8: mod_base = OTHER; note = 2-O-methylribose adenine
  modified_base 9: mod_base = gm
  modified_base 10: mod_base = gm
  modified_base 11: mod_base = um
  modified_base 12: mod_base = um
  modified_base 13: mod_base = um
  modified_base 14: mod_base = OTHER; note = 2-fluororibose uracil
  modified_base 15: mod_base = gm
  modified_base 16: mod_base = OTHER; note = 2-fluororibose adenine
  modified_base 17: mod_base = um
  modified_base 18: mod_base = OTHER; note = 2-O-methylribose adenine
  modified_base 19: mod_base = cm
  modified_base 20: mod_base = cm
  modified_base 21: mod_base = OTHER; note = 2-O-methylribose adenine
  modified_base 22: mod_base = um
  modified_base 22..23: mod_base = OTHER; note R-N-(1,3-dimethylimidazolidin-2-ylidene)phosphoramidate
  modified_base 23: mod_base = um
  source 1..23: mol_type = other RNA
tgacatgaggttttgataccatt

SEQ ID NO: 958 - RNA, 23 nt, synthetic construct
  misc_feature 1..23: note = Synthetic: WV-45048
  misc_feature 1..23: note = Synthetic: SSR-0105030
  modified_base 1: mod_base = um
  modified_base 1..2: mod_base = OTHER; note = S-phosphorothioate
  modified_base 2: mod_base = OTHER; note = 2-fluororibose guanine
  modified_base 2..3: mod_base = OTHER; note = R-phosphorothioate
  modified_base 3: mod_base = OTHER; note = 2-O-methylribose adenine
  modified_base 4: mod_base = cm
  modified_base 5: mod_base = OTHER; note = 2-O-methylribose adenine
  modified_base 6: mod_base = OTHER; note = 2-fluororibose uracil
  modified_base 7: mod_base = gm
  modified_base 8: mod_base = OTHER; note = 2-O-methylribose adenine
  modified_base 9: mod_base = gm
  modified_base 10: mod_base = gm
  modified_base 11: mod_base = um
  modified_base 12: mod_base = um
  modified_base 13: mod_base = um
  modified_base 14: mod_base = OTHER; note = 2-fluororibose uracil
  modified_base 15: mod_base = gm
  modified_base 16: mod_base = OTHER; note = 2-fluororibose adenine
  modified_base 17: mod_base = um
  modified_base 18: mod_base = OTHER; note = 2-O-methylribose adenine
  modified_base 19: mod_base = cm
  modified_base 20: mod_base = cm
  modified_base 21: mod_base = OTHER; note = 2-O-methylribose adenine
  modified_base 22: mod_base = um
  modified_base 22..23: mod_base = OTHER; note R-N-(1,3-dimethylimidazolidin-2-ylidene)phosphoramidate
  modified_base 23: mod_base = um
  source 1..23: mol_type = other RNA
tgacatgaggttttgataccatt

SEQ ID NO: 959 - RNA, 23 nt, synthetic construct
  misc_feature 1..23: note = Synthetic: WV-45049
  misc_feature 1..23: note = Synthetic: SSR-0104990
  modified_base 1: mod_base = um
  modified_base 1..2: mod_base = OTHER; note = R-phosphorothioate
  modified_base 2: mod_base = OTHER; note = 2-fluororibose guanine
  modified_base 2..3: mod_base = OTHER; note = S-phosphorothioate
  modified_base 3: mod_base = OTHER; note = 2-O-methylribose adenine
  modified_base 4: mod_base = cm
  modified_base 5: mod_base = OTHER; note = 2-O-methylribose adenine
  modified_base 6: mod_base = OTHER; note = 2-fluororibose uracil
  modified_base 7: mod_base = gm
  modified_base 8: mod_base = OTHER; note = 2-O-methylribose adenine
  modified_base 9: mod_base = gm
  modified_base 10: mod_base = gm
  modified_base 11: mod_base = um
  modified_base 12: mod_base = um
  modified_base 13: mod_base = um
  modified_base 14: mod_base = OTHER; note = 2-fluororibose uracil
  modified_base 15: mod_base = gm
  modified_base 16: mod_base = OTHER; note = 2-fluororibose adenine
  modified_base 17: mod_base = um
  modified_base 18: mod_base = OTHER; note = 2-O-methylribose adenine
  modified_base 19: mod_base = cm
  modified_base 20: mod_base = cm
  modified_base 21: mod_base = OTHER; note = 2-O-methylribose adenine
  modified_base 22: mod_base = um
  modified_base 22..23: mod_base = OTHER; note S-N-(1,3-dimethylimidazolidin-2-ylidene)phosphoramidate
  modified_base 23: mod_base = um
  source 1..23: mol_type = other RNA
tgacatgaggttttgataccatt

SEQ ID NO: 960 - RNA, 23 nt, synthetic construct
  misc_feature 1..23: note = Synthetic: WV-45050
  misc_feature 1..23: note = Synthetic: SSR-0105031
  modified_base 1: mod_base = um
  modified_base 1..2: mod_base = OTHER; note = S-phosphorothioate
  modified_base 2: mod_base = OTHER; note = 2-fluororibose guanine
  modified_base 2..3: mod_base = OTHER; note = R-phosphorothioate
  modified_base 3: mod_base = OTHER; note = 2-O-methylribose adenine
  modified_base 4: mod_base = cm
  modified_base 5: mod_base = OTHER; note = 2-O-methylribose adenine
  modified_base 6: mod_base = OTHER; note = 2-fluororibose uracil
  modified_base 7: mod_base = gm
  modified_base 8: mod_base = OTHER; note = 2-O-methylribose adenine
  modified_base 9: mod_base = gm
  modified_base 10: mod_base = gm
  modified_base 11: mod_base = um
  modified_base 12: mod_base = um
  modified_base 13: mod_base = um
  modified_base 14: mod_base = OTHER; note = 2-fluororibose uracil
  modified_base 15: mod_base = gm
  modified_base 16: mod_base = OTHER; note = 2-fluororibose adenine
  modified_base 17: mod_base = um
  modified_base 18: mod_base = OTHER; note = 2-O-methylribose adenine
  modified_base 19: mod_base = cm
  modified_base 20: mod_base = cm
  modified_base 21: mod_base = OTHER; note = 2-O-methylribose adenine
  modified_base 22: mod_base = um
  modified_base 22..23: mod_base = OTHER; note S-N-(1,3-dimethylimidazolidin-2-ylidene)phosphoramidate
  modified_base 23: mod_base = um
  source 1..23: mol_type = other RNA
tgacatgaggttttgataccatt

SEQ ID NO: 961 - RNA, 23 nt, synthetic construct
  misc_feature 1..23: note = Synthetic: WV-45051
  misc_feature 1..23: note = Synthetic: SSR-0104978
  modified_base 1: mod_base = um
  modified_base 1..2: mod_base = OTHER; note = R-phosphorothioate
  modified_base 2: mod_base = OTHER; note = 2-fluororibose guanine
  modified_base 2..3: mod_base = OTHER; note = S-phosphorothioate
  modified_base 3: mod_base = OTHER; note = 2-O-methylribose adenine
  modified_base 4: mod_base = cm
  modified_base 5: mod_base = OTHER; note = 2-O-methylribose adenine
  modified_base 6: mod_base = OTHER; note = 2-fluororibose uracil
  modified_base 7: mod_base = gm
  modified_base 8: mod_base = OTHER; note = 2-fluororibose adenine
  modified_base 9: mod_base = gm
  modified_base 10: mod_base = gm
  modified_base 11: mod_base = um
  modified_base 12: mod_base = OTHER; note = 2-fluororibose uracil
  modified_base 13: mod_base = um
  modified_base 14: mod_base = OTHER; note = 2-fluororibose uracil
  modified_base 15: mod_base = gm
  modified_base 16: mod_base = OTHER; note = 2-fluororibose adenine
  modified_base 17: mod_base = um
  modified_base 18: mod_base = OTHER; note = 2-O-methylribose adenine
  modified_base 19: mod_base = cm
  modified_base 20: mod_base = cm
  modified_base 21: mod_base = OTHER; note = 2-O-methylribose adenine
  modified_base 21..22: mod_base = OTHER; note = S-phosphorothioate
  modified_base 22: mod_base = um
  modified_base 22..23: mod_base = OTHER; note = S-phosphorothioate
  modified_base 23: mod_base = um
  source 1..23: mol_type = other RNA
tgacatgaggttttgataccatt

SEQ ID NO: 962 - RNA, 23 nt, synthetic construct
  misc_feature 1..23: note = Synthetic: WV-45052
  misc_feature 1..23: note = Synthetic: SSR-0105018
  modified_base 1: mod_base = um
  modified_base 1..2: mod_base = OTHER; note = S-phosphorothioate
  modified_base 2: mod_base = OTHER; note = 2-fluororibose guanine
  modified_base 2..3: mod_base = OTHER; note = R-phosphorothioate
  modified_base 3: mod_base = OTHER; note = 2-O-methylribose adenine
  modified_base 4: mod_base = cm
  modified_base 5: mod_base = OTHER; note = 2-O-methylribose adenine
  modified_base 6: mod_base = OTHER; note = 2-fluororibose uracil
  modified_base 7: mod_base = gm
  modified_base 8: mod_base = OTHER; note = 2-fluororibose adenine
  modified_base 9: mod_base = gm
  modified_base 10: mod_base = gm
  modified_base 11: mod_base = um
  modified_base 12: mod_base = OTHER; note = 2-fluororibose uracil
  modified_base 13: mod_base = um
  modified_base 14: mod_base = OTHER; note = 2-fluororibose uracil
  modified_base 15: mod_base = gm
  modified_base 16: mod_base = OTHER; note = 2-fluororibose adenine
  modified_base 17: mod_base = um
  modified_base 18: mod_base = OTHER; note = 2-O-methylribose adenine
  modified_base 19: mod_base = cm
  modified_base 20: mod_base = cm
  modified_base 21: mod_base = OTHER; note = 2-O-methylribose adenine
  modified_base 21..22: mod_base = OTHER; note = S-phosphorothioate
  modified_base 22: mod_base = um
  modified_base 22..23: mod_base = OTHER; note = S-phosphorothioate
  modified_base 23: mod_base = um
  source 1..23: mol_type = other RNA
tgacatgaggttttgataccatt

SEQ ID NO: 963 - RNA, 23 nt, synthetic construct
  misc_feature 1..23: note = Synthetic: WV-45053
  misc_feature 1..23: note = Synthetic: SSR-0104979
  modified_base 1: mod_base = um
  modified_base 1..2: mod_base = OTHER; note = R-phosphorothioate
  modified_base 2: mod_base = OTHER; note = 2-fluororibose guanine
  modified_base 2..3: mod_base = OTHER; note = S-phosphorothioate
  modified_base 3: mod_base = OTHER; note = 2-O-methylribose adenine
  modified_base 4: mod_base = cm
  modified_base 5: mod_base = OTHER; note = 2-O-methylribose adenine
  modified_base 6: mod_base = OTHER; note = 2-fluororibose uracil
  modified_base 7: mod_base = gm
  modified_base 8: mod_base = OTHER; note = 2-fluororibose adenine
  modified_base 9: mod_base = gm
  modified_base 10: mod_base = gm
  modified_base 11: mod_base = um
  modified_base 12: mod_base = OTHER; note = 2-fluororibose uracil
  modified_base 13: mod_base = um
  modified_base 14: mod_base = OTHER; note = 2-fluororibose uracil
  modified_base 15: mod_base = gm
  modified_base 16: mod_base = OTHER; note = 2-fluororibose adenine
  modified_base 17: mod_base = um
  modified_base 18: mod_base = OTHER; note = 2-O-methylribose adenine
  modified_base 19: mod_base = cm
  modified_base 20: mod_base = cm
  modified_base 21: mod_base = OTHER; note = 2-O-methylribose adenine
  modified_base 21..22: mod_base = OTHER; note = S-phosphorothioate
  modified_base 22: mod_base = um
  modified_base 22..23: mod_base = OTHER; note R-N-(1,3-dimethylimidazolidin-2-ylidene)phosphoramidate
  modified_base 23: mod_base = um
  source 1..23: mol_type = other RNA
tgacatgaggttttgataccatt

SEQ ID NO: 964 - RNA, 23 nt, synthetic construct
  misc_feature 1..23: note = Synthetic: WV-45054
  misc_feature 1..23: note = Synthetic: SSR-0105019
  modified_base 1: mod_base = um
  modified_base 1..2: mod_base = OTHER; note = S-phosphorothioate
  modified_base 2: mod_base = OTHER; note = 2-fluororibose guanine
  modified_base 2..3: mod_base = OTHER; note = R-phosphorothioate
  modified_base 3: mod_base = OTHER; note = 2-O-methylribose adenine
  modified_base 4: mod_base = cm
  modified_base 5: mod_base = OTHER; note = 2-O-methylribose adenine
  modified_base 6: mod_base = OTHER; note = 2-fluororibose uracil
  modified_base 7: mod_base = gm
  modified_base 8: mod_base = OTHER; note = 2-fluororibose adenine
  modified_base 9: mod_base = gm
  modified_base 10: mod_base = gm
  modified_base 11: mod_base = um
  modified_base 12: mod_base = OTHER; note = 2-fluororibose uracil
  modified_base 13: mod_base = um
  modified_base 14: mod_base = OTHER; note = 2-fluororibose uracil
  modified_base 15: mod_base = gm
  modified_base 16: mod_base = OTHER; note = 2-fluororibose adenine
  modified_base 17: mod_base = um
  modified_base 18: mod_base = OTHER; note = 2-O-methylribose adenine
  modified_base 19: mod_base = cm
  modified_base 20: mod_base = cm
  modified_base 21: mod_base = OTHER; note = 2-O-methylribose adenine
  modified_base 21..22: mod_base = OTHER; note = S-phosphorothioate
  modified_base 22: mod_base = um
  modified_base 22..23: mod_base = OTHER; note R-N-(1,3-dimethylimidazolidin-2-ylidene)phosphoramidate
  modified_base 23: mod_base = um
  source 1..23: mol_type = other RNA
tgacatgaggttttgataccatt

SEQ ID NO: 965 - RNA, 23 nt, synthetic construct
  misc_feature 1..23: note = Synthetic: WV-45055
  misc_feature 1..23: note = Synthetic: SSR-0104980
  modified_base 1: mod_base = um
  modified_base 1..2: mod_base = OTHER; note = R-phosphorothioate
  modified_base 2: mod_base = OTHER; note = 2-fluororibose guanine
  modified_base 2..3: mod_base = OTHER; note = S-phosphorothioate
  modified_base 3: mod_base = OTHER; note = 2-O-methylribose adenine
  modified_base 4: mod_base = cm
  modified_base 5: mod_base = OTHER; note = 2-O-methylribose adenine
  modified_base 6: mod_base = OTHER; note = 2-fluororibose uracil
  modified_base 7: mod_base = gm
  modified_base 8: mod_base = OTHER; note = 2-fluororibose adenine
  modified_base 9: mod_base = gm
  modified_base 10: mod_base = gm
  modified_base 11: mod_base = um
  modified_base 12: mod_base = OTHER; note = 2-fluororibose uracil
  modified_base 13: mod_base = um
  modified_base 14: mod_base = OTHER; note = 2-fluororibose uracil
  modified_base 15: mod_base = gm
  modified_base 16: mod_base = OTHER; note = 2-fluororibose adenine
  modified_base 17: mod_base = um
  modified_base 18: mod_base = OTHER; note = 2-O-methylribose adenine
  modified_base 19: mod_base = cm
  modified_base 20: mod_base = cm
  modified_base 21: mod_base = OTHER; note = 2-O-methylribose adenine
  modified_base 21..22: mod_base = OTHER; note = S-phosphorothioate
  modified_base 22: mod_base = um
  modified_base 22..23: mod_base = OTHER; note S-N-(1,3-dimethylimidazolidin-2-ylidene)phosphoramidate
  modified_base 23: mod_base = um
  source 1..23: mol_type = other RNA
tgacatgaggttttgataccatt

SEQ ID NO: 966 - RNA, 23 nt, synthetic construct
  misc_feature 1..23: note = Synthetic: WV-45056
  misc_feature 1..23: note = Synthetic: SSR-0105020
  modified_base 1: mod_base = um
  modified_base 1..2: mod_base = OTHER; note = S-phosphorothioate
  modified_base 2: mod_base = OTHER; note = 2-fluororibose guanine
  modified_base 2..3: mod_base = OTHER; note = R-phosphorothioate
  modified_base 3: mod_base = OTHER; note = 2-O-methylribose adenine
  modified_base 4: mod_base = cm
  modified_base 5: mod_base = OTHER; note = 2-O-methylribose adenine
  modified_base 6: mod_base = OTHER; note = 2-fluororibose uracil
  modified_base 7: mod_base = gm
  modified_base 8: mod_base = OTHER; note = 2-fluororibose adenine
  modified_base 9: mod_base = gm
  modified_base 10: mod_base = gm
  modified_base 11: mod_base = um
  modified_base 12: mod_base = OTHER; note = 2-fluororibose uracil
  modified_base 13: mod_base = um
  modified_base 14: mod_base = OTHER; note = 2-fluororibose uracil
  modified_base 15: mod_base = gm
  modified_base 16: mod_base = OTHER; note = 2-fluororibose adenine
  modified_base 17: mod_base = um
  modified_base 18: mod_base = OTHER; note = 2-O-methylribose adenine
  modified_base 19: mod_base = cm
  modified_base 20: mod_base = cm
  modified_base 21: mod_base = OTHER; note = 2-O-methylribose adenine
  modified_base 21..22: mod_base = OTHER; note = S-phosphorothioate
  modified_base 22: mod_base = um
  modified_base 22..23: mod_base = OTHER; note S-N-(1,3-dimethylimidazolidin-2-ylidene)phosphoramidate
  modified_base 23: mod_base = um
  source 1..23: mol_type = other RNA
tgacatgaggttttgataccatt

SEQ ID NO: 967 - RNA, 23 nt, synthetic construct
  misc_feature 1..23: note = Synthetic: WV-45057
  misc_feature 1..23: note = Synthetic: SSR-0104981
  modified_base 1: mod_base = um
  modified_base 1..2: mod_base = OTHER; note = R-phosphorothioate
  modified_base 2: mod_base = OTHER; note = 2-fluororibose guanine
  modified_base 2..3: mod_base = OTHER; note = S-phosphorothioate
  modified_base 3: mod_base = OTHER; note = 2-O-methylribose adenine
  modified_base 4: mod_base = cm
  modified_base 5: mod_base = OTHER; note = 2-O-methylribose adenine
  modified_base 6: mod_base = OTHER; note = 2-fluororibose uracil
  modified_base 7: mod_base = gm
  modified_base 8: mod_base = OTHER; note = 2-fluororibose adenine
  modified_base 9: mod_base = gm
  modified_base 10: mod_base = gm
  modified_base 11: mod_base = um
  modified_base 12: mod_base = OTHER; note = 2-fluororibose uracil
  modified_base 13: mod_base = um
  modified_base 14: mod_base = OTHER; note = 2-fluororibose uracil
  modified_base 15: mod_base = gm
  modified_base 16: mod_base = OTHER; note = 2-fluororibose adenine
  modified_base 17: mod_base = um
  modified_base 18: mod_base = OTHER; note = 2-O-methylribose adenine
  modified_base 19: mod_base = cm
  modified_base 20: mod_base = cm
  modified_base 21: mod_base = OTHER; note = 2-O-methylribose adenine
  modified_base 22: mod_base = um
  modified_base 22..23: mod_base = OTHER; note R-N-(1,3-dimethylimidazolidin-2-ylidene)phosphoramidate
  modified_base 23: mod_base = um
  source 1..23: mol_type = other RNA
tgacatgaggttttgataccatt

SEQ ID NO: 968 - RNA, 23 nt, synthetic construct
  misc_feature 1..23: note = Synthetic: WV-45058
  misc_feature 1..23: note = Synthetic: SSR-0105021
  modified_base 1: mod_base = um
  modified_base 1..2: mod_base = OTHER; note = S-phosphorothioate
  modified_base 2: mod_base = OTHER; note = 2-fluororibose guanine
  modified_base 2..3: mod_base = OTHER; note = R-phosphorothioate
  modified_base 3: mod_base = OTHER; note = 2-O-methylribose adenine
  modified_base 4: mod_base = cm
  modified_base 5: mod_base = OTHER; note = 2-O-methylribose adenine
  modified_base 6: mod_base = OTHER; note = 2-fluororibose uracil
  modified_base 7: mod_base = gm
  modified_base 8: mod_base = OTHER; note = 2-fluororibose adenine
  modified_base 9: mod_base = gm
  modified_base 10: mod_base = gm
  modified_base 11: mod_base = um
  modified_base 12: mod_base = OTHER; note = 2-fluororibose uracil
  modified_base 13: mod_base = um
  modified_base 14: mod_base = OTHER; note = 2-fluororibose uracil
  modified_base 15: mod_base = gm
  modified_base 16: mod_base = OTHER; note = 2-fluororibose adenine
  modified_base 17: mod_base = um
  modified_base 18: mod_base = OTHER; note = 2-O-methylribose adenine
  modified_base 19: mod_base = cm
  modified_base 20: mod_base = cm
  modified_base 21: mod_base = OTHER; note = 2-O-methylribose adenine
  modified_base 22: mod_base = um
  modified_base 22..23: mod_base = OTHER; note R-N-(1,3-dimethylimidazolidin-2-ylidene)phosphoramidate
  modified_base 23: mod_base = um
  source 1..23: mol_type = other RNA
tgacatgaggttttgataccatt

SEQ ID NO: 969 - RNA, 23 nt, synthetic construct
  misc_feature 1..23: note = Synthetic: WV-45059
  misc_feature 1..23: note = Synthetic: SSR-0104982
  modified_base 1: mod_base = um
  modified_base 1..2: mod_base = OTHER; note = R-phosphorothioate
  modified_base 2: mod_base = OTHER; note = 2-fluororibose guanine
  modified_base 2..3: mod_base = OTHER; note = S-phosphorothioate
  modified_base 3: mod_base = OTHER; note = 2-O-methylribose adenine
  modified_base 4: mod_base = cm
  modified_base 5: mod_base = OTHER; note = 2-O-methylribose adenine
  modified_base 6: mod_base = OTHER; note = 2-fluororibose uracil
  modified_base 7: mod_base = gm
  modified_base 8: mod_base = OTHER; note = 2-fluororibose adenine
  modified_base 9: mod_base = gm
  modified_base 10: mod_base = gm
  modified_base 11: mod_base = um
  modified_base 12: mod_base = OTHER; note = 2-fluororibose uracil
  modified_base 13: mod_base = um
  modified_base 14: mod_base = OTHER; note = 2-fluororibose uracil
  modified_base 15: mod_base = gm
  modified_base 16: mod_base = OTHER; note = 2-fluororibose adenine
  modified_base 17: mod_base = um
  modified_base 18: mod_base = OTHER; note = 2-O-methylribose adenine
  modified_base 19: mod_base = cm
  modified_base 20: mod_base = cm
  modified_base 21: mod_base = OTHER; note = 2-O-methylribose adenine
  modified_base 22: mod_base = um
  modified_base 22..23: mod_base = OTHER; note S-N-(1,3-dimethylimidazolidin-2-ylidene)phosphoramidate
  modified_base 23: mod_base = um
  source 1..23: mol_type = other RNA
tgacatgaggttttgataccatt

SEQ ID NO: 970 - RNA, 23 nt, synthetic construct
  misc_feature 1..23: note = Synthetic: WV-45060
  misc_feature 1..23: note = Synthetic: SSR-0105022
  modified_base 1: mod_base = um
  modified_base 1..2: mod_base = OTHER; note = S-phosphorothioate
  modified_base 2: mod_base = OTHER; note = 2-fluororibose guanine
  modified_base 2..3: mod_base = OTHER; note = R-phosphorothioate
  modified_base 3: mod_base = OTHER; note = 2-O-methylribose adenine
  modified_base 4: mod_base = cm
  modified_base 5: mod_base = OTHER; note = 2-O-methylribose adenine
  modified_base 6: mod_base = OTHER; note = 2-fluororibose uracil
  modified_base 7: mod_base = gm
  modified_base 8: mod_base = OTHER; note = 2-fluororibose adenine
  modified_base 9: mod_base = gm
  modified_base 10: mod_base = gm
  modified_base 11: mod_base = um
  modified_base 12: mod_base = OTHER; note = 2-fluororibose uracil
  modified_base 13: mod_base = um
  modified_base 14: mod_base = OTHER; note = 2-fluororibose uracil
  modified_base 15: mod_base = gm
  modified_base 16: mod_base = OTHER; note = 2-fluororibose adenine
  modified_base 17: mod_base = um
  modified_base 18: mod_base = OTHER; note = 2-O-methylribose adenine
  modified_base 19: mod_base = cm
  modified_base 20: mod_base = cm
  modified_base 21: mod_base = OTHER; note = 2-O-methylribose adenine
  modified_base 22: mod_base = um
  modified_base 22..23: mod_base = OTHER; note S-N-(1,3-dimethylimidazolidin-2-ylidene)phosphoramidate
  modified_base 23: mod_base = um
  source 1..23: mol_type = other RNA
tgacatgaggttttgataccatt

SEQ ID NO: 971 - RNA, 23 nt, synthetic construct
  misc_feature 1..23: note = Synthetic: WV-46471
  misc_feature 1..23: note = Synthetic: SSR-0104991
  modified_base 1: mod_base = um
  modified_base 1..2: mod_base = OTHER; note = R-phosphorothioate
  modified_base 2: mod_base = OTHER; note = 2-fluororibose guanine
  modified_base 2..3: mod_base = OTHER; note = S-phosphorothioate
  modified_base 3: mod_base = um
  modified_base 3..4: mod_base = OTHER; note S-N-(1,3-dimethylimidazolidin-2-ylidene)phosphoramidate
  modified_base 4: mod_base = gm
  modified_base 5: mod_base = OTHER; note = 2-O-methylribose adenine
  modified_base 6: mod_base = OTHER; note = 2-fluororibose uracil
  modified_base 7: mod_base = cm
  modified_base 8: mod_base = cm
  modified_base 9: mod_base = OTHER; note = 2-O-methylribose adenine
  modified_base 10: mod_base = OTHER; note = 2-O-methylribose adenine
  modified_base 10..11: mod_base = OTHER; note S-N-(1,3-dimethylimidazolidin-2-ylidene)phosphoramidate
  modified_base 11: mod_base = OTHER; note = 2-O-methylribose adenine
  modified_base 12: mod_base = OTHER; note = 2-O-methylribose adenine
  modified_base 13: mod_base = OTHER; note = 2-O-methylribose adenine
  modified_base 14: mod_base = OTHER; note = 2-fluororibose uracil
  modified_base 15: mod_base = gm
  modified_base 16: mod_base = OTHER; note = 2-fluororibose uracil
  modified_base 17: mod_base = cm
  modified_base 18: mod_base = cm
  modified_base 19: mod_base = um
  modified_base 19..20: mod_base = OTHER; note S-N-(1,3-dimethylimidazolidin-2-ylidene)phosphoramidate
  modified_base 20: mod_base = OTHER; note = 2-O-methylribose adenine
  modified_base 21: mod_base = gm
  modified_base 21..22: mod_base = OTHER; note = S-phosphorothioate
  modified_base 22: mod_base = um
  modified_base 22..23: mod_base = OTHER; note = S-phosphorothioate
  modified_base 23: mod_base = um
  source 1..23: mol_type = other RNA
tgtgatccaaaaatgtcctagtt

SEQ ID NO: 972 - RNA, 23 nt, synthetic construct
  misc_feature 1..23: note = Synthetic: WV-46472
  misc_feature 1..23: note = Synthetic: SSR-0105000
  modified_base 1: mod_base = um
  modified_base 1..2: mod_base = OTHER; note = R-phosphorothioate
  modified_base 2: mod_base = OTHER; note = 2-fluororibose guanine
  modified_base 2..3: mod_base = OTHER; note = S-phosphorothioate
  modified_base 3: mod_base = um
  modified_base 4: mod_base = gm
  modified_base 5: mod_base = OTHER; note = 2-O-methylribose adenine
  modified_base 6: mod_base = OTHER; note = 2-fluororibose uracil
  modified_base 7: mod_base = cm
  modified_base 8: mod_base = cm
  modified_base 9: mod_base = OTHER; note = 2-O-methylribose adenine
  modified_base 10: mod_base = OTHER; note = 2-O-methylribose adenine
  modified_base 10..11: mod_base = OTHER; note S-N-(1,3-dimethylimidazolidin-2-ylidene)phosphoramidate
  modified_base 11: mod_base = OTHER; note = 2-O-methylribose adenine
  modified_base 12: mod_base = OTHER; note = 2-O-methylribose adenine
  modified_base 13: mod_base = OTHER; note = 2-O-methylribose adenine
  modified_base 14: mod_base = OTHER; note = 2-fluororibose uracil
  modified_base 15: mod_base = gm
  modified_base 16: mod_base = OTHER; note = 2-fluororibose uracil
  modified_base 17: mod_base = cm
  modified_base 18: mod_base = cm
  modified_base 19: mod_base = um
  modified_base 19..20: mod_base = OTHER; note S-N-(1,3-dimethylimidazolidin-2-ylidene)phosphoramidate
  modified_base 20: mod_base = OTHER; note = 2-O-methylribose adenine
  modified_base 21: mod_base = gm
  modified_base 21..22: mod_base = OTHER; note = S-phosphorothioate
  modified_base 22: mod_base = um
  modified_base 22..23: mod_base = OTHER; note = S-phosphorothioate
  modified_base 23: mod_base = um
  source 1..23: mol_type = other RNA
tgtgatccaaaaatgtcctagtt

SEQ ID NO: 973 - RNA, 23 nt, synthetic construct
  misc_feature 1..23: note = Synthetic: WV-46473
  misc_feature 1..23: note = Synthetic: SSR-0104993
  modified_base 1: mod_base = um
  modified_base 1..2: mod_base = OTHER; note = R-phosphorothioate
  modified_base 2: mod_base = OTHER; note = 2-fluororibose guanine
  modified_base 2..3: mod_base = OTHER; note = S-phosphorothioate
  modified_base 3: mod_base = um
  modified_base 3..4: mod_base = OTHER; note S-N-(1,3-dimethylimidazolidin-2-ylidene)phosphoramidate
  modified_base 4: mod_base = gm
  modified_base 5: mod_base = OTHER; note = 2-O-methylribose adenine
  modified_base 6: mod_base = OTHER; note = 2-fluororibose uracil
  modified_base 7: mod_base = cm
  modified_base 8: mod_base = cm
  modified_base 9: mod_base = OTHER; note = 2-O-methylribose adenine
  modified_base 10: mod_base = OTHER; note = 2-O-methylribose adenine
  modified_base 11: mod_base = OTHER; note = 2-O-methylribose adenine
  modified_base 12: mod_base = OTHER; note = 2-O-methylribose adenine
  modified_base 13: mod_base = OTHER; note = 2-O-methylribose adenine
  modified_base 14: mod_base = OTHER; note = 2-fluororibose uracil
  modified_base 15: mod_base = gm
  modified_base 16: mod_base = OTHER; note = 2-fluororibose uracil
  modified_base 17: mod_base = cm
  modified_base 18: mod_base = cm
  modified_base 19: mod_base = um
  modified_base 19..20: mod_base = OTHER; note S-N-(1,3-dimethylimidazolidin-2-ylidene)phosphoramidate
  modified_base 20: mod_base = OTHER; note = 2-O-methylribose adenine
  modified_base 21: mod_base = gm
  modified_base 21..22: mod_base = OTHER; note = S-phosphorothioate
  modified_base 22: mod_base = um
  modified_base 22..23: mod_base = OTHER; note = S-phosphorothioate
  modified_base 23: mod_base = um
  source 1..23: mol_type = other RNA
tgtgatccaaaaatgtcctagtt

SEQ ID NO: 974 - RNA, 23 nt, synthetic construct
  misc_feature 1..23: note = Synthetic: WV-46474
  misc_feature 1..23: note = Synthetic: SSR-0104992
  modified_base 1: mod_base = um
  modified_base 1..2: mod_base = OTHER; note = R-phosphorothioate
  modified_base 2: mod_base = OTHER; note = 2-fluororibose guanine
  modified_base 2..3: mod_base = OTHER; note = S-phosphorothioate
  modified_base 3: mod_base = um
  modified_base 3..4: mod_base = OTHER; note S-N-(1,3-dimethylimidazolidin-2-ylidene)phosphoramidate
  modified_base 4: mod_base = gm
  modified_base 5: mod_base = OTHER; note = 2-O-methylribose adenine
  modified_base 6: mod_base = OTHER; note = 2-fluororibose uracil
  modified_base 7: mod_base = cm
  modified_base 8: mod_base = cm
  modified_base 9: mod_base = OTHER; note = 2-O-methylribose adenine
  modified_base 10: mod_base = OTHER; note = 2-O-methylribose adenine
  modified_base 10..11: mod_base = OTHER; note S-N-(1,3-dimethylimidazolidin-2-ylidene)phosphoramidate
  modified_base 11: mod_base = OTHER; note = 2-O-methylribose adenine
  modified_base 12: mod_base = OTHER; note = 2-O-methylribose adenine
  modified_base 13: mod_base = OTHER; note = 2-O-methylribose adenine
  modified_base 14: mod_base = OTHER; note = 2-fluororibose uracil
  modified_base 15: mod_base = gm
  modified_base 16: mod_base = OTHER; note = 2-fluororibose uracil
  modified_base 17: mod_base = cm
  modified_base 18: mod_base = cm
  modified_base 19: mod_base = um
  modified_base 20: mod_base = OTHER; note = 2-O-methylribose adenine
  modified_base 21: mod_base = gm
  modified_base 21..22: mod_base = OTHER; note = S-phosphorothioate
  modified_base 22: mod_base = um
  modified_base 22..23: mod_base = OTHER; note = S-phosphorothioate
  modified_base 23: mod_base = um
  source 1..23: mol_type = other RNA
tgtgatccaaaaatgtcctagtt

SEQ ID NO: 975 - RNA, 23 nt, synthetic construct
  misc_feature 1..23: note = Synthetic: WV-46475
  misc_feature 1..23: note = Synthetic: SSR-0105002
  modified_base 1: mod_base = um
  modified_base 1..2: mod_base = OTHER; note = R-phosphorothioate
  modified_base 2: mod_base = OTHER; note = 2-fluororibose guanine
  modified_base 2..3: mod_base = OTHER; note = S-phosphorothioate
  modified_base 3: mod_base = um
  modified_base 4: mod_base = gm
  modified_base 5: mod_base = OTHER; note = 2-O-methylribose adenine
  modified_base 6: mod_base = OTHER; note = 2-fluororibose uracil
  modified_base 7: mod_base = cm
  modified_base 8: mod_base = cm
  modified_base 9: mod_base = OTHER; note = 2-O-methylribose adenine
  modified_base 10: mod_base = OTHER; note = 2-O-methylribose adenine
  modified_base 11: mod_base = OTHER; note = 2-O-methylribose adenine
  modified_base 12: mod_base = OTHER; note = 2-O-methylribose adenine
  modified_base 13: mod_base = OTHER; note = 2-O-methylribose adenine
  modified_base 14: mod_base = OTHER; note = 2-fluororibose uracil
  modified_base 15: mod_base = gm
  modified_base 16: mod_base = OTHER; note = 2-fluororibose uracil
  modified_base 17: mod_base = cm
  modified_base 18: mod_base = cm
  modified_base 19: mod_base = um
  modified_base 19..20: mod_base = OTHER; note S-N-(1,3-dimethylimidazolidin-2-ylidene)phosphoramidate
  modified_base 20: mod_base = OTHER; note = 2-O-methylribose adenine
  modified_base 21: mod_base = gm
  modified_base 21..22: mod_base = OTHER; note = S-phosphorothioate
  modified_base 22: mod_base = um
  modified_base 22..23: mod_base = OTHER; note = S-phosphorothioate
  modified_base 23: mod_base = um
  source 1..23: mol_type = other RNA
tgtgatccaaaaatgtcctagtt

SEQ ID NO: 976 - RNA, 23 nt, synthetic construct
  misc_feature 1..23: note = Synthetic: WV-46476
  misc_feature 1..23: note = Synthetic: SSR-0105001
  modified_base 1: mod_base = um
  modified_base 1..2: mod_base = OTHER; note = R-phosphorothioate
  modified_base 2: mod_base = OTHER; note = 2-fluororibose guanine
  modified_base 2..3: mod_base = OTHER; note = S-phosphorothioate
  modified_base 3: mod_base = um
  modified_base 4: mod_base = gm
  modified_base 5: mod_base = OTHER; note = 2-O-methylribose adenine
  modified_base 6: mod_base = OTHER; note = 2-fluororibose uracil
  modified_base 7: mod_base = cm
  modified_base 8: mod_base = cm
  modified_base 9: mod_base = OTHER; note = 2-O-methylribose adenine
  modified_base 10: mod_base = OTHER; note = 2-O-methylribose adenine
  modified_base 10..11: mod_base = OTHER; note S-N-(1,3-dimethylimidazolidin-2-ylidene)phosphoramidate
  modified_base 11: mod_base = OTHER; note = 2-O-methylribose adenine
  modified_base 12: mod_base = OTHER; note = 2-O-methylribose adenine
  modified_base 13: mod_base = OTHER; note = 2-O-methylribose adenine
  modified_base 14: mod_base = OTHER; note = 2-fluororibose uracil
  modified_base 15: mod_base = gm
  modified_base 16: mod_base = OTHER; note = 2-fluororibose uracil
  modified_base 17: mod_base = cm
  modified_base 18: mod_base = cm
  modified_base 19: mod_base = um
  modified_base 20: mod_base = OTHER; note = 2-O-methylribose adenine
  modified_base 21: mod_base = gm
  modified_base 21..22: mod_base = OTHER; note = S-phosphorothioate
  modified_base 22: mod_base = um
  modified_base 22..23: mod_base = OTHER; note = S-phosphorothioate
  modified_base 23: mod_base = um
  source 1..23: mol_type = other RNA
tgtgatccaaaaatgtcctagtt

SEQ ID NO: 977 - RNA, 23 nt, synthetic construct
  misc_feature 1..23: note = Synthetic: WV-46477
  misc_feature 1..23: note = Synthetic: SSR-0104994
  modified_base 1: mod_base = um
  modified_base 1..2: mod_base = OTHER; note = R-phosphorothioate
  modified_base 2: mod_base = OTHER; note = 2-fluororibose guanine
  modified_base 2..3: mod_base = OTHER; note = S-phosphorothioate
  modified_base 3: mod_base = um
  modified_base 3..4: mod_base = OTHER; note S-N-(1,3-dimethylimidazolidin-2-ylidene)phosphoramidate
  modified_base 4: mod_base = gm
  modified_base 5: mod_base = OTHER; note = 2-O-methylribose adenine
  modified_base 6: mod_base = OTHER; note = 2-fluororibose uracil
  modified_base 7: mod_base = cm
  modified_base 8: mod_base = cm
  modified_base 9: mod_base = OTHER; note = 2-O-methylribose adenine
  modified_base 10: mod_base = OTHER; note = 2-O-methylribose adenine
  modified_base 11: mod_base = OTHER; note = 2-O-methylribose adenine
  modified_base 12: mod_base = OTHER; note = 2-O-methylribose adenine
  modified_base 13: mod_base = OTHER; note = 2-O-methylribose adenine
  modified_base 14: mod_base = OTHER; note = 2-fluororibose uracil
  modified_base 15: mod_base = gm
  modified_base 16: mod_base = OTHER; note = 2-fluororibose uracil
  modified_base 17: mod_base = cm
  modified_base 18: mod_base = cm
  modified_base 19: mod_base = um
  modified_base 20: mod_base = OTHER; note = 2-O-methylribose adenine
  modified_base 21: mod_base = gm
  modified_base 21..22: mod_base = OTHER; note = S-phosphorothioate
  modified_base 22: mod_base = um
  modified_base 22..23: mod_base = OTHER; note = S-phosphorothioate
  modified_base 23: mod_base = um
  source 1..23: mol_type = other RNA
tgtgatccaaaaatgtcctagtt

SEQ ID NO: 978 - RNA, 23 nt, synthetic construct
  misc_feature 1..23: note = Synthetic: WV-46478
  misc_feature 1..23: note = Synthetic: SSR-0105045
  modified_base 1: mod_base = um
  modified_base 1..2: mod_base = OTHER; note = S-phosphorothioate
  modified_base 2: mod_base = OTHER; note = 2-fluororibose guanine
  modified_base 2..3: mod_base = OTHER; note = R-phosphorothioate
  modified_base 3: mod_base = um
  modified_base 4: mod_base = gm
  modified_base 5: mod_base = OTHER; note = 2-O-methylribose adenine
  modified_base 6: mod_base = OTHER; note = 2-fluororibose uracil
  modified_base 7: mod_base = cm
  modified_base 8: mod_base = cm
  modified_base 9: mod_base = OTHER; note = 2-O-methylribose adenine
  modified_base 10: mod_base = OTHER; note = 2-O-methylribose adenine
  modified_base 10..11: mod_base = OTHER; note S-N-(1,3-dimethylimidazolidin-2-ylidene)phosphoramidate
  modified_base 11: mod_base = OTHER; note = 2-O-methylribose adenine
  modified_base 12: mod_base = OTHER; note = 2-O-methylribose adenine
  modified_base 13: mod_base = OTHER; note = 2-O-methylribose adenine
  modified_base 14: mod_base = OTHER; note = 2-fluororibose uracil
  modified_base 15: mod_base = gm
  modified_base 16: mod_base = OTHER; note = 2-fluororibose uracil
  modified_base 17: mod_base = cm
  modified_base 18: mod_base = cm
  modified_base 19: mod_base = um
  modified_base 19..20: mod_base = OTHER; note S-N-(1,3-dimethylimidazolidin-2-ylidene)phosphoramidate
  modified_base 20: mod_base = OTHER; note = 2-O-methylribose adenine
  modified_base 21: mod_base = gm
  modified_base 21..22: mod_base = OTHER; note = S-phosphorothioate
  modified_base 22: mod_base = um
  modified_base 22..23: mod_base = OTHER; note = S-phosphorothioate
  modified_base 23: mod_base = um
  source 1..23: mol_type = other RNA
tgtgatccaaaaatgtcctagtt

SEQ ID NO: 979 - RNA, 23 nt, synthetic construct
  misc_feature 1..23: note = Synthetic: WV-46479
  misc_feature 1..23: note = Synthetic: SSR-0105036
  modified_base 1: mod_base = um
  modified_base 1..2: mod_base = OTHER; note = S-phosphorothioate
  modified_base 2: mod_base = OTHER; note = 2-fluororibose guanine
  modified_base 2..3: mod_base = OTHER; note = R-phosphorothioate
  modified_base 3: mod_base = um
  modified_base 3..4: mod_base = OTHER; note S-N-(1,3-dimethylimidazolidin-2-ylidene)phosphoramidate
  modified_base 4: mod_base = gm
  modified_base 5: mod_base = OTHER; note = 2-O-methylribose adenine
  modified_base 6: mod_base = OTHER; note = 2-fluororibose uracil
  modified_base 7: mod_base = cm
  modified_base 8: mod_base = cm
  modified_base 9: mod_base = OTHER; note = 2-O-methylribose adenine
  modified_base 10: mod_base = OTHER; note = 2-O-methylribose adenine
  modified_base 11: mod_base = OTHER; note = 2-O-methylribose adenine
  modified_base 12: mod_base = OTHER; note = 2-O-methylribose adenine
  modified_base 13: mod_base = OTHER; note = 2-O-methylribose adenine
  modified_base 14: mod_base = OTHER; note = 2-fluororibose uracil
  modified_base 15: mod_base = gm
  modified_base 16: mod_base = OTHER; note = 2-fluororibose uracil
  modified_base 17: mod_base = cm
  modified_base 18: mod_base = cm
  modified_base 19: mod_base = um
  modified_base 19..20: mod_base = OTHER; note S-N-(1,3-dimethylimidazolidin-2-ylidene)phosphoramidate
  modified_base 20: mod_base = OTHER; note = 2-O-methylribose adenine
  modified_base 21: mod_base = gm
  modified_base 21..22: mod_base = OTHER; note = S-phosphorothioate
  modified_base 22: mod_base = um
  modified_base 22..23: mod_base = OTHER; note = S-phosphorothioate
  modified_base 23: mod_base = um
  source 1..23: mol_type = other RNA
tgtgatccaaaaatgtcctagtt

SEQ ID NO: 980 - RNA, 23 nt, synthetic construct
  misc_feature 1..23: note = Synthetic: WV-46480
  misc_feature 1..23: note = Synthetic: SSR-0105035
  modified_base 1: mod_base = um
  modified_base 1..2: mod_base = OTHER; note = S-phosphorothioate
  modified_base 2: mod_base = OTHER; note = 2-fluororibose guanine
  modified_base 2..3: mod_base = OTHER; note = R-phosphorothioate
  modified_base 3: mod_base = um
  modified_base 3..4: mod_base = OTHER; note S-N-(1,3-dimethylimidazolidin-2-ylidene)phosphoramidate
  modified_base 4: mod_base = gm
  modified_base 5: mod_base = OTHER; note = 2-O-methylribose adenine
  modified_base 6: mod_base = OTHER; note = 2-fluororibose uracil
  modified_base 7: mod_base = cm
  modified_base 8: mod_base = cm
  modified_base 9: mod_base = OTHER; note = 2-O-methylribose adenine
  modified_base 10: mod_base = OTHER; note = 2-O-methylribose adenine
  modified_base 10..11: mod_base = OTHER; note S-N-(1,3-dimethylimidazolidin-2-ylidene)phosphoramidate
  modified_base 11: mod_base = OTHER; note = 2-O-methylribose adenine
  modified_base 12: mod_base = OTHER; note = 2-O-methylribose adenine
  modified_base 13: mod_base = OTHER; note = 2-O-methylribose adenine
  modified_base 14: mod_base = OTHER; note = 2-fluororibose uracil
  modified_base 15: mod_base = gm
  modified_base 16: mod_base = OTHER; note = 2-fluororibose uracil
  modified_base 17: mod_base = cm
  modified_base 18: mod_base = cm
  modified_base 19: mod_base = um
  modified_base 20: mod_base = OTHER; note = 2-O-methylribose adenine
  modified_base 21: mod_base = gm
  modified_base 21..22: mod_base = OTHER; note = S-phosphorothioate
  modified_base 22: mod_base = um
  modified_base 22..23: mod_base = OTHER; note = S-phosphorothioate
  modified_base 23: mod_base = um
  source 1..23: mol_type = other RNA
tgtgatccaaaaatgtcctagtt

SEQ ID NO: 981 - RNA, 23 nt, synthetic construct
  misc_feature 1..23: note = Synthetic: WV-46481
  misc_feature 1..23: note = Synthetic: SSR-0105047
  modified_base 1: mod_base = um
  modified_base 1..2: mod_base = OTHER; note = S-phosphorothioate
  modified_base 2: mod_base = OTHER; note = 2-fluororibose guanine
  modified_base 2..3: mod_base = OTHER; note = R-phosphorothioate
  modified_base 3: mod_base = um
  modified_base 4: mod_base = gm
  modified_base 5: mod_base = OTHER; note = 2-O-methylribose adenine
  modified_base 6: mod_base = OTHER; note = 2-fluororibose uracil
  modified_base 7: mod_base = cm
  modified_base 8: mod_base = cm
  modified_base 9: mod_base = OTHER; note = 2-O-methylribose adenine
  modified_base 10: mod_base = OTHER; note = 2-O-methylribose adenine
  modified_base 11: mod_base = OTHER; note = 2-O-methylribose adenine
  modified_base 12: mod_base = OTHER; note = 2-O-methylribose adenine
  modified_base 13: mod_base = OTHER; note = 2-O-methylribose adenine
  modified_base 14: mod_base = OTHER; note = 2-fluororibose uracil
  modified_base 15: mod_base = gm
  modified_base 16: mod_base = OTHER; note = 2-fluororibose uracil
  modified_base 17: mod_base = cm
  modified_base 18: mod_base = cm
  modified_base 19: mod_base = um
  modified_base 19..20: mod_base = OTHER; note S-N-(1,3-dimethylimidazolidin-2-ylidene)phosphoramidate
  modified_base 20: mod_base = OTHER; note = 2-O-methylribose adenine
  modified_base 21: mod_base = gm
  modified_base 21..22: mod_base = OTHER; note = S-phosphorothioate
  modified_base 22: mod_base = um
  modified_base 22..23: mod_base = OTHER; note = S-phosphorothioate
  modified_base 23: mod_base = um
  source 1..23: mol_type = other RNA
tgtgatccaaaaatgtcctagtt

SEQ ID NO: 982 - RNA, 23 nt, synthetic construct
  misc_feature 1..23: note = Synthetic: WV-46482
  misc_feature 1..23: note = Synthetic: SSR-0105046
  modified_base 1: mod_base = um
  modified_base 1..2: mod_base = OTHER; note = S-phosphorothioate
  modified_base 2: mod_base = OTHER; note = 2-fluororibose guanine
  modified_base 2..3: mod_base = OTHER; note = R-phosphorothioate
  modified_base 3: mod_base = um
  modified_base 4: mod_base = gm
  modified_base 5: mod_base = OTHER; note = 2-O-methylribose adenine
  modified_base 6: mod_base = OTHER; note = 2-fluororibose uracil
  modified_base 7: mod_base = cm
  modified_base 8: mod_base = cm
  modified_base 9: mod_base = OTHER; note = 2-O-methylribose adenine
  modified_base 10: mod_base = OTHER; note = 2-O-methylribose adenine
  modified_base 10..11: mod_base = OTHER; note S-N-(1,3-dimethylimidazolidin-2-ylidene)phosphoramidate
  modified_base 11: mod_base = OTHER; note = 2-O-methylribose adenine
  modified_base 12: mod_base = OTHER; note = 2-O-methylribose adenine
  modified_base 13: mod_base = OTHER; note = 2-O-methylribose adenine
  modified_base 14: mod_base = OTHER; note = 2-fluororibose uracil
  modified_base 15: mod_base = gm
  modified_base 16: mod_base = OTHER; note = 2-fluororibose uracil
  modified_base 17: mod_base = cm
  modified_base 18: mod_base = cm
  modified_base 19: mod_base = um
  modified_base 20: mod_base = OTHER; note = 2-O-methylribose adenine
  modified_base 21: mod_base = gm
  modified_base 21..22: mod_base = OTHER; note = S-phosphorothioate
  modified_base 22: mod_base = um
  modified_base 22..23: mod_base = OTHER; note = S-phosphorothioate
  modified_base 23: mod_base = um
  source 1..23: mol_type = other RNA
tgtgatccaaaaatgtcctagtt

SEQ ID NO: 983 - RNA, 23 nt, synthetic construct
  misc_feature 1..23: note = Synthetic: WV-46483
  misc_feature 1..23: note = Synthetic: SSR-0105037
  modified_base 1: mod_base = um
  modified_base 1..2: mod_base = OTHER; note = S-phosphorothioate
  modified_base 2: mod_base = OTHER; note = 2-fluororibose guanine
  modified_base 2..3: mod_base = OTHER; note = R-phosphorothioate
  modified_base 3: mod_base = um
  modified_base 3..4: mod_base = OTHER; note S-N-(1,3-dimethylimidazolidin-2-ylidene)phosphoramidate
  modified_base 4: mod_base = gm
  modified_base 5: mod_base = OTHER; note = 2-O-methylribose adenine
  modified_base 6: mod_base = OTHER; note = 2-fluororibose uracil
  modified_base 7: mod_base = cm
  modified_base 8: mod_base = cm
  modified_base 9: mod_base = OTHER; note = 2-O-methylribose adenine
  modified_base 10: mod_base = OTHER; note = 2-O-methylribose adenine
  modified_base 11: mod_base = OTHER; note = 2-O-methylribose adenine
  modified_base 12: mod_base = OTHER; note = 2-O-methylribose adenine
  modified_base 13: mod_base = OTHER; note = 2-O-methylribose adenine
  modified_base 14: mod_base = OTHER; note = 2-fluororibose uracil
  modified_base 15: mod_base = gm
  modified_base 16: mod_base = OTHER; note = 2-fluororibose uracil
  modified_base 17: mod_base = cm
  modified_base 18: mod_base = cm
  modified_base 19: mod_base = um
  modified_base 20: mod_base = OTHER; note = 2-O-methylribose adenine
  modified_base 21: mod_base = gm
  modified_base 21..22: mod_base = OTHER; note = S-phosphorothioate
  modified_base 22: mod_base = um
  modified_base 22..23: mod_base = OTHER; note = S-phosphorothioate
  modified_base 23: mod_base = um
  source 1..23: mol_type = other RNA
tgtgatccaaaaatgtcctagtt

SEQ ID NO: 984 - RNA, 23 nt, synthetic construct
  misc_feature 1..23: note = Synthetic: WV-46484
  misc_feature 1..23: note = Synthetic: SSR-0104974
  modified_base 1: mod_base = um
  modified_base 1..2: mod_base = OTHER; note = R-phosphorothioate
  modified_base 2: mod_base = OTHER; note = 2-fluororibose guanine
  modified_base 2..3: mod_base = OTHER; note = S-phosphorothioate
  modified_base 3: mod_base = OTHER; note = 2-O-methylribose adenine
  modified_base 3..4: mod_base = OTHER; note S-N-(1,3-dimethylimidazolidin-2-ylidene)phosphoramidate
  modified_base 4: mod_base = cm
  modified_base 5: mod_base = OTHER; note = 2-O-methylribose adenine
  modified_base 6: mod_base = OTHER; note = 2-fluororibose uracil
  modified_base 7: mod_base = gm
  modified_base 8: mod_base = OTHER; note = 2-O-methylribose adenine
  modified_base 9: mod_base = gm
  modified_base 10: mod_base = gm
  modified_base 10..11: mod_base = OTHER; note S-N-(1,3-dimethylimidazolidin-2-ylidene)phosphoramidate
  modified_base 11: mod_base = um
  modified_base 12: mod_base = um
  modified_base 13: mod_base = um
  modified_base 14: mod_base = OTHER; note = 2-fluororibose uracil
  modified_base 15: mod_base = gm
  modified_base 16: mod_base = OTHER; note = 2-fluororibose adenine
  modified_base 17: mod_base = um
  modified_base 18: mod_base = OTHER; note = 2-O-methylribose adenine
  modified_base 19: mod_base = cm
  modified_base 19..20: mod_base = OTHER; note S-N-(1,3-dimethylimidazolidin-2-ylidene)phosphoramidate
  modified_base 20: mod_base = cm
  modified_base 21: mod_base = OTHER; note = 2-O-methylribose adenine
  modified_base 21..22: mod_base = OTHER; note = S-phosphorothioate
  modified_base 22: mod_base = um
  modified_base 22..23: mod_base = OTHER; note = S-phosphorothioate
  modified_base 23: mod_base = um
  source 1..23: mol_type = other RNA
tgacatgaggttttgataccatt

SEQ ID NO: 985 - RNA, 23 nt, synthetic construct
  misc_feature 1..23: note = Synthetic: WV-46485
  misc_feature 1..23: note = Synthetic: SSR-0104983
  modified_base 1: mod_base = um
  modified_base 1..2: mod_base = OTHER; note = R-phosphorothioate
  modified_base 2: mod_base = OTHER; note = 2-fluororibose guanine
  modified_base 2..3: mod_base = OTHER; note = S-phosphorothioate
  modified_base 3: mod_base = OTHER; note = 2-O-methylribose adenine
  modified_base 4: mod_base = cm
  modified_base 5: mod_base = OTHER; note = 2-O-methylribose adenine
  modified_base 6: mod_base = OTHER; note = 2-fluororibose uracil
  modified_base 7: mod_base = gm
  modified_base 8: mod_base = OTHER; note = 2-O-methylribose adenine
  modified_base 9: mod_base = gm
  modified_base 10: mod_base = gm
  modified_base 10..11: mod_base = OTHER; note S-N-(1,3-dimethylimidazolidin-2-ylidene)phosphoramidate
  modified_base 11: mod_base = um
  modified_base 12: mod_base = um
  modified_base 13: mod_base = um
  modified_base 14: mod_base = OTHER; note = 2-fluororibose uracil
  modified_base 15: mod_base = gm
  modified_base 16: mod_base = OTHER; note = 2-fluororibose adenine
  modified_base 17: mod_base = um
  modified_base 18: mod_base = OTHER; note = 2-O-methylribose adenine
  modified_base 19: mod_base = cm
  modified_base 19..20: mod_base = OTHER; note S-N-(1,3-dimethylimidazolidin-2-ylidene)phosphoramidate
  modified_base 20: mod_base = cm
  modified_base 21: mod_base = OTHER; note = 2-O-methylribose adenine
  modified_base 21..22: mod_base = OTHER; note = S-phosphorothioate
  modified_base 22: mod_base = um
  modified_base 22..23: mod_base = OTHER; note = S-phosphorothioate
  modified_base 23: mod_base = um
  source 1..23: mol_type = other RNA
tgacatgaggttttgataccatt

SEQ ID NO: 986 - RNA, 23 nt, synthetic construct
  misc_feature 1..23: note = Synthetic: WV-46486
  misc_feature 1..23: note = Synthetic: SSR-0104976
  modified_base 1: mod_base = um
  modified_base 1..2: mod_base = OTHER; note = R-phosphorothioate
  modified_base 2: mod_base = OTHER; note = 2-fluororibose guanine
  modified_base 2..3: mod_base = OTHER; note = S-phosphorothioate
  modified_base 3: mod_base = OTHER; note = 2-O-methylribose adenine
  modified_base 3..4: mod_base = OTHER; note S-N-(1,3-dimethylimidazolidin-2-ylidene)phosphoramidate
  modified_base 4: mod_base = cm
  modified_base 5: mod_base = OTHER; note = 2-O-methylribose adenine
  modified_base 6: mod_base = OTHER; note = 2-fluororibose uracil
  modified_base 7: mod_base = gm
  modified_base 8: mod_base = OTHER; note = 2-O-methylribose adenine
  modified_base 9: mod_base = gm
  modified_base 10: mod_base = gm
  modified_base 11: mod_base = um
  modified_base 12: mod_base = um
  modified_base 13: mod_base = um
  modified_base 14: mod_base = OTHER; note = 2-fluororibose uracil
  modified_base 15: mod_base = gm
  modified_base 16: mod_base = OTHER; note = 2-fluororibose adenine
  modified_base 17: mod_base = um
  modified_base 18: mod_base = OTHER; note = 2-O-methylribose adenine
  modified_base 19: mod_base = cm
  modified_base 19..20: mod_base = OTHER; note S-N-(1,3-dimethylimidazolidin-2-ylidene)phosphoramidate
  modified_base 20: mod_base = cm
  modified_base 21: mod_base = OTHER; note = 2-O-methylribose adenine
  modified_base 21..22: mod_base = OTHER; note = S-phosphorothioate
  modified_base 22: mod_base = um
  modified_base 22..23: mod_base = OTHER; note = S-phosphorothioate
  modified_base 23: mod_base = um
  source 1..23: mol_type = other RNA
tgacatgaggttttgataccatt

SEQ ID NO: 987 - RNA, 23 nt, synthetic construct
  misc_feature 1..23: note = Synthetic: WV-46487
  misc_feature 1..23: note = Synthetic: SSR-0104975
  modified_base 1: mod_base = um
  modified_base 1..2: mod_base = OTHER; note = R-phosphorothioate
  modified_base 2: mod_base = OTHER; note = 2-fluororibose guanine
  modified_base 2..3: mod_base = OTHER; note = S-phosphorothioate
  modified_base 3: mod_base = OTHER; note = 2-O-methylribose adenine
  modified_base 3..4: mod_base = OTHER; note S-N-(1,3-dimethylimidazolidin-2-ylidene)phosphoramidate
  modified_base 4: mod_base = cm
  modified_base 5: mod_base = OTHER; note = 2-O-methylribose adenine
  modified_base 6: mod_base = OTHER; note = 2-fluororibose uracil
  modified_base 7: mod_base = gm
  modified_base 8: mod_base = OTHER; note = 2-O-methylribose adenine
  modified_base 9: mod_base = gm
  modified_base 10: mod_base = gm
  modified_base 10..11: mod_base = OTHER; note S-N-(1,3-dimethylimidazolidin-2-ylidene)phosphoramidate
  modified_base 11: mod_base = um
  modified_base 12: mod_base = um
  modified_base 13: mod_base = um
  modified_base 14: mod_base = OTHER; note = 2-fluororibose uracil
  modified_base 15: mod_base = gm
  modified_base 16: mod_base = OTHER; note = 2-fluororibose adenine
  modified_base 17: mod_base = um
  modified_base 18: mod_base = OTHER; note = 2-O-methylribose adenine
  modified_base 19: mod_base = cm
  modified_base 20: mod_base = cm
  modified_base 21: mod_base = OTHER; note = 2-O-methylribose adenine
  modified_base 21..22: mod_base = OTHER; note = S-phosphorothioate
  modified_base 22: mod_base = um
  modified_base 22..23: mod_base = OTHER; note = S-phosphorothioate
  modified_base 23: mod_base = um
  source 1..23: mol_type = other RNA
tgacatgaggttttgataccatt

SEQ ID NO: 988 - RNA, 23 nt, synthetic construct
  misc_feature 1..23: note = Synthetic: WV-46488
  misc_feature 1..23: note = Synthetic: SSR-0104985
  modified_base 1: mod_base = um
  modified_base 1..2: mod_base = OTHER; note = R-phosphorothioate
  modified_base 2: mod_base = OTHER; note = 2-fluororibose guanine
  modified_base 2..3: mod_base = OTHER; note = S-phosphorothioate
  modified_base 3: mod_base = OTHER; note = 2-O-methylribose adenine
  modified_base 4: mod_base = cm
  modified_base 5: mod_base = OTHER; note = 2-O-methylribose adenine
  modified_base 6: mod_base = OTHER; note = 2-fluororibose uracil
  modified_base 7: mod_base = gm
  modified_base 8: mod_base = OTHER; note = 2-O-methylribose adenine
  modified_base 9: mod_base = gm
  modified_base 10: mod_base = gm
  modified_base 11: mod_base = um
  modified_base 12: mod_base = um
  modified_base 13: mod_base = um
  modified_base 14: mod_base = OTHER; note = 2-fluororibose uracil
  modified_base 15: mod_base = gm
  modified_base 16: mod_base = OTHER; note = 2-fluororibose adenine
  modified_base 17: mod_base = um
  modified_base 18: mod_base = OTHER; note = 2-O-methylribose adenine
  modified_base 19: mod_base = cm
  modified_base 19..20: mod_base = OTHER; note S-N-(1,3-dimethylimidazolidin-2-ylidene)phosphoramidate
  modified_base 20: mod_base = cm
  modified_base 21: mod_base = OTHER; note = 2-O-methylribose adenine
  modified_base 21..22: mod_base = OTHER; note = S-phosphorothioate
  modified_base 22: mod_base = um
  modified_base 22..23: mod_base = OTHER; note = S-phosphorothioate
  modified_base 23: mod_base = um
  source 1..23: mol_type = other RNA
tgacatgaggttttgataccatt

SEQ ID NO: 989 - RNA, 23 nt, synthetic construct
  misc_feature 1..23: note = Synthetic: WV-46489
  misc_feature 1..23: note = Synthetic: SSR-0104984
  modified_base 1: mod_base = um
  modified_base 1..2: mod_base = OTHER; note = R-phosphorothioate
  modified_base 2: mod_base = OTHER; note = 2-fluororibose guanine
  modified_base 2..3: mod_base = OTHER; note = S-phosphorothioate
  modified_base 3: mod_base = OTHER; note = 2-O-methylribose adenine
  modified_base 4: mod_base = cm
  modified_base 5: mod_base = OTHER; note = 2-O-methylribose adenine
  modified_base 6: mod_base = OTHER; note = 2-fluororibose uracil
  modified_base 7: mod_base = gm
  modified_base 8: mod_base = OTHER; note = 2-O-methylribose adenine
  modified_base 9: mod_base = gm
  modified_base 10: mod_base = gm
  modified_base 10..11: mod_base = OTHER; note S-N-(1,3-dimethylimidazolidin-2-ylidene)phosphoramidate
  modified_base 11: mod_base = um
  modified_base 12: mod_base = um
  modified_base 13: mod_base = um
  modified_base 14: mod_base = OTHER; note = 2-fluororibose uracil
  modified_base 15: mod_base = gm
  modified_base 16: mod_base = OTHER; note = 2-fluororibose adenine
  modified_base 17: mod_base = um
  modified_base 18: mod_base = OTHER; note = 2-O-methylribose adenine
  modified_base 19: mod_base = cm
  modified_base 20: mod_base = cm
  modified_base 21: mod_base = OTHER; note = 2-O-methylribose adenine
  modified_base 21..22: mod_base = OTHER; note = S-phosphorothioate
  modified_base 22: mod_base = um
  modified_base 22..23: mod_base = OTHER; note = S-phosphorothioate
  modified_base 23: mod_base = um
  source 1..23: mol_type = other RNA
tgacatgaggttttgataccatt

SEQ ID NO: 990 - RNA, 23 nt, synthetic construct
  misc_feature 1..23: note = Synthetic: WV-46490
  misc_feature 1..23: note = Synthetic: SSR-0104977
  modified_base 1: mod_base = um
  modified_base 1..2: mod_base = OTHER; note = R-phosphorothioate
  modified_base 2: mod_base = OTHER; note = 2-fluororibose guanine
  modified_base 2..3: mod_base = OTHER; note = S-phosphorothioate
  modified_base 3: mod_base = OTHER; note = 2-O-methylribose adenine
  modified_base 3..4: mod_base = OTHER; note S-N-(1,3-dimethylimidazolidin-2-ylidene)phosphoramidate
  modified_base 4: mod_base = cm
  modified_base 5: mod_base = OTHER; note = 2-O-methylribose adenine
  modified_base 6: mod_base = OTHER; note = 2-fluororibose uracil
  modified_base 7: mod_base = gm
  modified_base 8: mod_base = OTHER; note = 2-O-methylribose adenine
  modified_base 9: mod_base = gm
  modified_base 10: mod_base = gm
  modified_base 11: mod_base = um
  modified_base 12: mod_base = um
  modified_base 13: mod_base = um
  modified_base 14: mod_base = OTHER; note = 2-fluororibose uracil
  modified_base 15: mod_base = gm
  modified_base 16: mod_base = OTHER; note = 2-fluororibose adenine
  modified_base 17: mod_base = um
  modified_base 18: mod_base = OTHER; note = 2-O-methylribose adenine
  modified_base 19: mod_base = cm
  modified_base 20: mod_base = cm
  modified_base 21: mod_base = OTHER; note = 2-O-methylribose adenine
  modified_base 21..22: mod_base = OTHER; note = S-phosphorothioate
  modified_base 22: mod_base = um
  modified_base 22..23: mod_base = OTHER; note = S-phosphorothioate
  modified_base 23: mod_base = um
  source 1..23: mol_type = other RNA
tgacatgaggttttgataccatt

SEQ ID NO: 991 - RNA, 23 nt, synthetic construct
  misc_feature 1..23: note = Synthetic: WV-46491
  misc_feature 1..23: note = Synthetic: SSR-0105024
  modified_base 1: mod_base = um
  modified_base 1..2: mod_base = OTHER; note = S-phosphorothioate
  modified_base 2: mod_base = OTHER; note = 2-fluororibose guanine
  modified_base 2..3: mod_base = OTHER; note = R-phosphorothioate
  modified_base 3: mod_base = OTHER; note = 2-O-methylribose adenine
  modified_base 4: mod_base = cm
  modified_base 5: mod_base = OTHER; note = 2-O-methylribose adenine
  modified_base 6: mod_base = OTHER; note = 2-fluororibose uracil
  modified_base 7: mod_base = gm
  modified_base 8: mod_base = OTHER; note = 2-O-methylribose adenine
  modified_base 9: mod_base = gm
  modified_base 10: mod_base = gm
  modified_base 10..11: mod_base = OTHER; note S-N-(1,3-dimethylimidazolidin-2-ylidene)phosphoramidate
  modified_base 11: mod_base = um
  modified_base 12: mod_base = um
  modified_base 13: mod_base = um
  modified_base 14: mod_base = OTHER; note = 2-fluororibose uracil
  modified_base 15: mod_base = gm
  modified_base 16: mod_base = OTHER; note = 2-fluororibose adenine
  modified_base 17: mod_base = um
  modified_base 18: mod_base = OTHER; note = 2-O-methylribose adenine
  modified_base 19: mod_base = cm
  modified_base 19..20: mod_base = OTHER; note S-N-(1,3-dimethylimidazolidin-2-ylidene)phosphoramidate
  modified_base 20: mod_base = cm
  modified_base 21: mod_base = OTHER; note = 2-O-methylribose adenine
  modified_base 21..22: mod_base = OTHER; note = S-phosphorothioate
  modified_base 22: mod_base = um
  modified_base 22..23: mod_base = OTHER; note = S-phosphorothioate
  modified_base 23: mod_base = um
  source 1..23: mol_type = other RNA
tgacatgaggttttgataccatt

SEQ ID NO: 992 - RNA, 23 nt, synthetic construct
  misc_feature 1..23: note = Synthetic: WV-46492
  misc_feature 1..23: note = Synthetic: SSR-0105015
  modified_base 1: mod_base = um
  modified_base 1..2: mod_base = OTHER; note = S-phosphorothioate
  modified_base 2: mod_base = OTHER; note = 2-fluororibose guanine
  modified_base 2..3: mod_base = OTHER; note = R-phosphorothioate
  modified_base 3: mod_base = OTHER; note = 2-O-methylribose adenine
  modified_base 3..4: mod_base = OTHER; note S-N-(1,3-dimethylimidazolidin-2-ylidene)phosphoramidate
  modified_base 4: mod_base = cm
  modified_base 5: mod_base = OTHER; note = 2-O-methylribose adenine
  modified_base 6: mod_base = OTHER; note = 2-fluororibose uracil
  modified_base 7: mod_base = gm
  modified_base 8: mod_base = OTHER; note = 2-O-methylribose adenine
  modified_base 9: mod_base = gm
  modified_base 10: mod_base = gm
  modified_base 11: mod_base = um
  modified_base 12: mod_base = um
  modified_base 13: mod_base = um
  modified_base 14: mod_base = OTHER; note = 2-fluororibose uracil
  modified_base 15: mod_base = gm
  modified_base 16: mod_base = OTHER; note = 2-fluororibose adenine
  modified_base 17: mod_base = um
  modified_base 18: mod_base = OTHER; note = 2-O-methylribose adenine
  modified_base 19: mod_base = cm
  modified_base 19..20: mod_base = OTHER; note S-N-(1,3-dimethylimidazolidin-2-ylidene)phosphoramidate
  modified_base 20: mod_base = cm
  modified_base 21: mod_base = OTHER; note = 2-O-methylribose adenine
  modified_base 21..22: mod_base = OTHER; note = S-phosphorothioate
  modified_base 22: mod_base = um
  modified_base 22..23: mod_base = OTHER; note = S-phosphorothioate
  modified_base 23: mod_base = um
  source 1..23: mol_type = other RNA
tgacatgaggttttgataccatt

SEQ ID NO: 993 - RNA, 23 nt, synthetic construct
  misc_feature 1..23: note = Synthetic: WV-46493
  misc_feature 1..23: note = Synthetic: SSR-0105014
  modified_base 1: mod_base = um
  modified_base 1..2: mod_base = OTHER; note = S-phosphorothioate
  modified_base 2: mod_base = OTHER; note = 2-fluororibose guanine
  modified_base 2..3: mod_base = OTHER; note = R-phosphorothioate
  modified_base 3: mod_base = OTHER; note = 2-O-methylribose adenine
  modified_base 3..4: mod_base = OTHER; note S-N-(1,3-dimethylimidazolidin-2-ylidene)phosphoramidate
  modified_base 4: mod_base = cm
  modified_base 5: mod_base = OTHER; note = 2-O-methylribose adenine
  modified_base 6: mod_base = OTHER; note = 2-fluororibose uracil
  modified_base 7: mod_base = gm
  modified_base 8: mod_base = OTHER; note = 2-O-methylribose adenine
  modified_base 9: mod_base = gm
  modified_base 10: mod_base = gm
  modified_base 10..11: mod_base = OTHER; note S-N-(1,3-dimethylimidazolidin-2-ylidene)phosphoramidate
  modified_base 11: mod_base = um
  modified_base 12: mod_base = um
  modified_base 13: mod_base = um
  modified_base 14: mod_base = OTHER; note = 2-fluororibose uracil
  modified_base 15: mod_base = gm
  modified_base 16: mod_base = OTHER; note = 2-fluororibose adenine
  modified_base 17: mod_base = um
  modified_base 18: mod_base = OTHER; note = 2-O-methylribose adenine
  modified_base 19: mod_base = cm
  modified_base 20: mod_base = cm
  modified_base 21: mod_base = OTHER; note = 2-O-methylribose adenine
  modified_base 21..22: mod_base = OTHER; note = S-phosphorothioate
  modified_base 22: mod_base = um
  modified_base 22..23: mod_base = OTHER; note = S-phosphorothioate
  modified_base 23: mod_base = um
  source 1..23: mol_type = other RNA
tgacatgaggttttgataccatt

SEQ ID NO: 994 - RNA, 23 nt, synthetic construct
  misc_feature 1..23: note = Synthetic: WV-46494
  misc_feature 1..23: note = Synthetic: SSR-0105026
  modified_base 1: mod_base = um
  modified_base 1..2: mod_base = OTHER; note = S-phosphorothioate
  modified_base 2: mod_base = OTHER; note = 2-fluororibose guanine
  modified_base 2..3: mod_base = OTHER; note = R-phosphorothioate
  modified_base 3: mod_base = OTHER; note = 2-O-methylribose adenine
  modified_base 4: mod_base = cm
  modified_base 5: mod_base = OTHER; note = 2-O-methylribose adenine
  modified_base 6: mod_base = OTHER; note = 2-fluororibose uracil
  modified_base 7: mod_base = gm
  modified_base 8: mod_base = OTHER; note = 2-O-methylribose adenine
  modified_base 9: mod_base = gm
  modified_base 10: mod_base = gm
  modified_base 11: mod_base = um
  modified_base 12: mod_base = um
  modified_base 13: mod_base = um
  modified_base 14: mod_base = OTHER; note = 2-fluororibose uracil
  modified_base 15: mod_base = gm
  modified_base 16: mod_base = OTHER; note = 2-fluororibose adenine
  modified_base 17: mod_base = um
  modified_base 18: mod_base = OTHER; note = 2-O-methylribose adenine
  modified_base 19: mod_base = cm
  modified_base 19..20: mod_base = OTHER; note S-N-(1,3-dimethylimidazolidin-2-ylidene)phosphoramidate
  modified_base 20: mod_base = cm
  modified_base 21: mod_base = OTHER; note = 2-O-methylribose adenine
  modified_base 21..22: mod_base = OTHER; note = S-phosphorothioate
  modified_base 22: mod_base = um
  modified_base 22..23: mod_base = OTHER; note = S-phosphorothioate
  modified_base 23: mod_base = um
  source 1..23: mol_type = other RNA
tgacatgaggttttgataccatt

SEQ ID NO: 995 - RNA, 23 nt, synthetic construct
  misc_feature 1..23: note = Synthetic: WV-46495
  misc_feature 1..23: note = Synthetic: SSR-0105025
  modified_base 1: mod_base = um
  modified_base 1..2: mod_base = OTHER; note = S-phosphorothioate
  modified_base 2: mod_base = OTHER; note = 2-fluororibose guanine
  modified_base 2..3: mod_base = OTHER; note = R-phosphorothioate
  modified_base 3: mod_base = OTHER; note = 2-O-methylribose adenine
  modified_base 4: mod_base = cm
  modified_base 5: mod_base = OTHER; note = 2-O-methylribose adenine
  modified_base 6: mod_base = OTHER; note = 2-fluororibose uracil
  modified_base 7: mod_base = gm
  modified_base 8: mod_base = OTHER; note = 2-O-methylribose adenine
  modified_base 9: mod_base = gm
  modified_base 10: mod_base = gm
  modified_base 10..11: mod_base = OTHER; note S-N-(1,3-dimethylimidazolidin-2-ylidene)phosphoramidate
  modified_base 11: mod_base = um
  modified_base 12: mod_base = um
  modified_base 13: mod_base = um
  modified_base 14: mod_base = OTHER; note = 2-fluororibose uracil
  modified_base 15: mod_base = gm
  modified_base 16: mod_base = OTHER; note = 2-fluororibose adenine
  modified_base 17: mod_base = um
  modified_base 18: mod_base = OTHER; note = 2-O-methylribose adenine
  modified_base 19: mod_base = cm
  modified_base 20: mod_base = cm
  modified_base 21: mod_base = OTHER; note = 2-O-methylribose adenine
  modified_base 21..22: mod_base = OTHER; note = S-phosphorothioate
  modified_base 22: mod_base = um
  modified_base 22..23: mod_base = OTHER; note = S-phosphorothioate
  modified_base 23: mod_base = um
  source 1..23: mol_type = other RNA
tgacatgaggttttgataccatt

SEQ ID NO: 996 - RNA, 23 nt, synthetic construct
  misc_feature 1..23: note = Synthetic: WV-46496
  misc_feature 1..23: note = Synthetic: SSR-0105016
  modified_base 1: mod_base = um
  modified_base 1..2: mod_base = OTHER; note = S-phosphorothioate
  modified_base 2: mod_base = OTHER; note = 2-fluororibose guanine
  modified_base 2..3: mod_base = OTHER; note = R-phosphorothioate
  modified_base 3: mod_base = OTHER; note = 2-O-methylribose adenine
  modified_base 3..4: mod_base = OTHER; note S-N-(1,3-dimethylimidazolidin-2-ylidene)phosphoramidate
  modified_base 4: mod_base = cm
  modified_base 5: mod_base = OTHER; note = 2-O-methylribose adenine
  modified_base 6: mod_base = OTHER; note = 2-fluororibose uracil
  modified_base 7: mod_base = gm
  modified_base 8: mod_base = OTHER; note = 2-O-methylribose adenine
  modified_base 9: mod_base = gm
  modified_base 10: mod_base = gm
  modified_base 11: mod_base = um
  modified_base 12: mod_base = um
  modified_base 13: mod_base = um
  modified_base 14: mod_base = OTHER; note = 2-fluororibose uracil
  modified_base 15: mod_base = gm
  modified_base 16: mod_base = OTHER; note = 2-fluororibose adenine
  modified_base 17: mod_base = um
  modified_base 18: mod_base = OTHER; note = 2-O-methylribose adenine
  modified_base 19: mod_base = cm
  modified_base 20: mod_base = cm
  modified_base 21: mod_base = OTHER; note = 2-O-methylribose adenine
  modified_base 21..22: mod_base = OTHER; note = S-phosphorothioate
  modified_base 22: mod_base = um
  modified_base 22..23: mod_base = OTHER; note = S-phosphorothioate
  modified_base 23: mod_base = um
  source 1..23: mol_type = other RNA
tgacatgaggttttgataccatt

SEQ ID NO: 997 - RNA, 23 nt, synthetic construct
  misc_feature 1..23: note = Synthetic: WV-47138
  misc_feature 1..23: note = Synthetic: SSR-0104973
  modified_base 1: mod_base = um
  modified_base 1..2: mod_base = OTHER; note = R-phosphorothioate
  modified_base 2: mod_base = OTHER; note = 2-fluororibose guanine
  modified_base 2..3: mod_base = OTHER; note = S-phosphorothioate
  modified_base 3: mod_base = OTHER; note = 2-O-methylribose adenine
  modified_base 3..4: mod_base = OTHER; note S-N-(1,3-dimethylimidazolidin-2-ylidene)phosphoramidate
  modified_base 4: mod_base = OTHER; note = 2-fluororibose cytosine
  modified_base 5: mod_base = OTHER; note = 2-O-methylribose adenine
  modified_base 6: mod_base = OTHER; note = 2-fluororibose uracil
  modified_base 7: mod_base = gm
  modified_base 8: mod_base = OTHER; note = 2-O-methylribose adenine
  modified_base 9: mod_base = gm
  modified_base 10: mod_base = gm
  modified_base 11: mod_base = um
  modified_base 12: mod_base = um
  modified_base 13: mod_base = um
  modified_base 14: mod_base = OTHER; note = 2-fluororibose uracil
  modified_base 15: mod_base = gm
  modified_base 16: mod_base = OTHER; note = 2-fluororibose adenine
  modified_base 17: mod_base = um
  modified_base 18: mod_base = OTHER; note = 2-O-methylribose adenine
  modified_base 19: mod_base = cm
  modified_base 20: mod_base = cm
  modified_base 21: mod_base = OTHER; note = 2-O-methylribose adenine
  modified_base 21..22: mod_base = OTHER; note = S-phosphorothioate
  modified_base 22: mod_base = um
  modified_base 22..23: mod_base = OTHER; note = S-phosphorothioate
  modified_base 23: mod_base = um
  source 1..23: mol_type = other RNA
tgacatgaggttttgataccatt

SEQ ID NO: 998 - RNA, 23 nt, synthetic construct
  misc_feature 1..23: note = Synthetic: WV-47139
  misc_feature 1..23: note = Synthetic: SSR-0105010
  modified_base 1: mod_base = um
  modified_base 1..2: mod_base = OTHER; note = S-phosphorothioate
  modified_base 2: mod_base = OTHER; note = 2-fluororibose guanine
  modified_base 2..3: mod_base = OTHER; note = R-phosphorothioate
  modified_base 3: mod_base = OTHER; note = 2-O-methylribose adenine
  modified_base 3..4: mod_base = OTHER; note S-N-(1,3-dimethylimidazolidin-2-ylidene)phosphoramidate
  modified_base 4: mod_base = OTHER; note = 2-fluororibose cytosine
  modified_base 5: mod_base = OTHER; note = 2-O-methylribose adenine
  modified_base 6: mod_base = OTHER; note = 2-fluororibose uracil
  modified_base 7: mod_base = gm
  modified_base 8: mod_base = OTHER; note = 2-O-methylribose adenine
  modified_base 9: mod_base = gm
  modified_base 10: mod_base = gm
  modified_base 11: mod_base = um
  modified_base 12: mod_base = um
  modified_base 13: mod_base = um
  modified_base 14: mod_base = OTHER; note = 2-fluororibose uracil
  modified_base 15: mod_base = gm
  modified_base 16: mod_base = OTHER; note = 2-fluororibose adenine
  modified_base 17: mod_base = um
  modified_base 18: mod_base = OTHER; note = 2-O-methylribose adenine
  modified_base 19: mod_base = cm
  modified_base 20: mod_base = cm
  modified_base 21: mod_base = OTHER; note = 2-O-methylribose adenine
  modified_base 21..22: mod_base = OTHER; note = S-phosphorothioate
  modified_base 22: mod_base = um
  modified_base 22..23: mod_base = OTHER; note = S-phosphorothioate
  modified_base 23: mod_base = um
  source 1..23: mol_type = other RNA
tgacatgaggttttgataccatt

SEQ ID NO: 999 - RNA, 23 nt, synthetic construct
  misc_feature 1..23: note = Synthetic: WV-47140
  misc_feature 1..23: note = Synthetic: SSR-0105032
  modified_base 1: mod_base = um
  modified_base 1..2: mod_base = OTHER; note = S-phosphorothioate
  modified_base 2: mod_base = OTHER; note = 2-fluororibose guanine
  modified_base 2..3: mod_base = OTHER; note = R-phosphorothioate
  modified_base 3: mod_base = um
  modified_base 3..4: mod_base = OTHER; note S-N-(1,3-dimethylimidazolidin-2-ylidene)phosphoramidate
  modified_base 4: mod_base = OTHER; note = 2-fluororibose guanine
  modified_base 5: mod_base = OTHER; note = 2-O-methylribose adenine
  modified_base 6: mod_base = OTHER; note = 2-fluororibose uracil
  modified_base 7: mod_base = cm
  modified_base 8: mod_base = cm
  modified_base 9: mod_base = OTHER; note = 2-O-methylribose adenine
  modified_base 10: mod_base = OTHER; note = 2-O-methylribose adenine
  modified_base 11: mod_base = OTHER; note = 2-O-methylribose adenine
  modified_base 12: mod_base = OTHER; note = 2-O-methylribose adenine
  modified_base 13: mod_base = OTHER; note = 2-O-methylribose adenine
  modified_base 14: mod_base = OTHER; note = 2-fluororibose uracil
  modified_base 15: mod_base = gm
  modified_base 16: mod_base = OTHER; note = 2-fluororibose uracil
  modified_base 17: mod_base = cm
  modified_base 18: mod_base = cm
  modified_base 19: mod_base = um
  modified_base 20: mod_base = OTHER; note = 2-O-methylribose adenine
  modified_base 21: mod_base = gm
  modified_base 21..22: mod_base = OTHER; note = S-phosphorothioate
  modified_base 22: mod_base = um
  modified_base 22..23: mod_base = OTHER; note = S-phosphorothioate
  modified_base 23: mod_base = um
  source 1..23: mol_type = other RNA
tgtgatccaaaaatgtcctagtt

SEQ ID NO: 1000 - RNA, 23 nt, synthetic construct
  misc_feature 1..23: note = Synthetic: WV-47158
  misc_feature 1..23: note = Synthetic: SSR-0104972
  modified_base 1: mod_base = um
  modified_base 1..2: mod_base = OTHER; note = R-phosphorothioate
  modified_base 2: mod_base = OTHER; note = 2-fluororibose guanine
  modified_base 2..3: mod_base = OTHER; note = S-phosphorothioate
  modified_base 3: mod_base = OTHER; note = 2-O-methylribose adenine
  modified_base 3..4: mod_base = OTHER; note S-N-(1,3-dimethylimidazolidin-2-ylidene)phosphoramidate
  modified_base 4: mod_base = OTHER; note = 2-fluororibose cytosine
  modified_base 5: mod_base = OTHER; note = 2-O-methylribose adenine
  modified_base 6: mod_base = OTHER; note = 2-fluororibose uracil
  modified_base 7: mod_base = gm
  modified_base 8: mod_base = OTHER; note = 2-O-methylribose adenine
  modified_base 9: mod_base = gm
  modified_base 10: mod_base = gm
  modified_base 10..11: mod_base = OTHER; note S-N-(1,3-dimethylimidazolidin-2-ylidene)phosphoramidate
  modified_base 11: mod_base = OTHER; note = 2-fluororibose uracil
  modified_base 12: mod_base = um
  modified_base 13: mod_base = um
  modified_base 14: mod_base = OTHER; note = 2-fluororibose uracil
  modified_base 15: mod_base = gm
  modified_base 16: mod_base = OTHER; note = 2-fluororibose adenine
  modified_base 17: mod_base = um
  modified_base 18: mod_base = OTHER; note = 2-O-methylribose adenine
  modified_base 19: mod_base = cm
  modified_base 20: mod_base = cm
  modified_base 21: mod_base = OTHER; note = 2-O-methylribose adenine
  modified_base 21..22: mod_base = OTHER; note = S-phosphorothioate
  modified_base 22: mod_base = um
  modified_base 22..23: mod_base = OTHER; note = S-phosphorothioate
  modified_base 23: mod_base = um
  source 1..23: mol_type = other RNA
tgacatgaggttttgataccatt

SEQ ID NO: 1001 - RNA, 23 nt, synthetic construct
  misc_feature 1..23: note = Synthetic: WV-47159
  misc_feature 1..23: note = Synthetic: SSR-0105009
  modified_base 1: mod_base = um
  modified_base 1..2: mod_base = OTHER; note = S-phosphorothioate
  modified_base 2: mod_base = OTHER; note = 2-fluororibose guanine
  modified_base 2..3: mod_base = OTHER; note = R-phosphorothioate
  modified_base 3: mod_base = OTHER; note = 2-O-methylribose adenine
  modified_base 3..4: mod_base = OTHER; note S-N-(1,3-dimethylimidazolidin-2-ylidene)phosphoramidate
  modified_base 4: mod_base = OTHER; note = 2-fluororibose cytosine
  modified_base 5: mod_base = OTHER; note = 2-O-methylribose adenine
  modified_base 6: mod_base = OTHER; note = 2-fluororibose uracil
  modified_base 7: mod_base = gm
  modified_base 8: mod_base = OTHER; note = 2-O-methylribose adenine
  modified_base 9: mod_base = gm
  modified_base 10: mod_base = gm
  modified_base 10..11: mod_base = OTHER; note S-N-(1,3-dimethylimidazolidin-2-ylidene)phosphoramidate
  modified_base 11: mod_base = OTHER; note = 2-fluororibose uracil
  modified_base 12: mod_base = um
  modified_base 13: mod_base = um
  modified_base 14: mod_base = OTHER; note = 2-fluororibose uracil
  modified_base 15: mod_base = gm
  modified_base 16: mod_base = OTHER; note = 2-fluororibose adenine
  modified_base 17: mod_base = um
  modified_base 18: mod_base = OTHER; note = 2-O-methylribose adenine
  modified_base 19: mod_base = cm
  modified_base 20: mod_base = cm
  modified_base 21: mod_base = OTHER; note = 2-O-methylribose adenine
  modified_base 21..22: mod_base = OTHER; note = S-phosphorothioate
  modified_base 22: mod_base = um
  modified_base 22..23: mod_base = OTHER; note = S-phosphorothioate
  modified_base 23: mod_base = um
  source 1..23: mol_type = other RNA
tgacatgaggttttgataccatt

SEQ ID NO: 1002 - RNA, 23 nt, synthetic construct
  misc_feature 1..23: note = Synthetic: WV-49590
  misc_feature 1..23: note = Synthetic: SSR-0105008
  modified_base 1: mod_base = um
  modified_base 1..2: mod_base = OTHER; note = S-phosphorothioate
  modified_base 2: mod_base = OTHER; note = 2-fluororibose guanine
  modified_base 2..3: mod_base = OTHER; note = R-phosphorothioate
  modified_base 3: mod_base = OTHER; note = 2-O-methylribose adenine
  modified_base 3..4: mod_base = OTHER; note S-N-(1,3-dimethylimidazolidin-2-ylidene)phosphoramidate
  modified_base 4: mod_base = OTHER; note = 2-fluororibose cytosine
  modified_base 5: mod_base = OTHER; note = 2-O-methylribose adenine
  modified_base 6: mod_base = OTHER; note = 2-fluororibose uracil
  modified_base 7: mod_base = gm
  modified_base 8: mod_base = OTHER; note = 2-O-methylribose adenine
  modified_base 9: mod_base = gm
  modified_base 10: mod_base = gm
  modified_base 10..11: mod_base = OTHER; note R-N-(1,3-dimethylimidazolidin-2-ylidene)phosphoramidate
  modified_base 11: mod_base = OTHER; note = 2-fluororibose uracil
  modified_base 12: mod_base = um
  modified_base 13: mod_base = um
  modified_base 14: mod_base = OTHER; note = 2-fluororibose uracil
  modified_base 15: mod_base = gm
  modified_base 16: mod_base = OTHER; note = 2-fluororibose adenine
  modified_base 17: mod_base = um
  modified_base 18: mod_base = OTHER; note = 2-O-methylribose adenine
  modified_base 19: mod_base = cm
  modified_base 20: mod_base = cm
  modified_base 21: mod_base = OTHER; note = 2-O-methylribose adenine
  modified_base 21..22: mod_base = OTHER; note = S-phosphorothioate
  modified_base 22: mod_base = um
  modified_base 22..23: mod_base = OTHER; note = S-phosphorothioate
  modified_base 23: mod_base = um
  source 1..23: mol_type = other RNA
tgacatgaggttttgataccatt

SEQ ID NO: 1003 - RNA, 23 nt, synthetic construct
  misc_feature 1..23: note = Synthetic: WV-49591
  misc_feature 1..23: note = Synthetic: SSR-0105023
  modified_base 1: mod_base = um
  modified_base 1..2: mod_base = OTHER; note = S-phosphorothioate
  modified_base 2: mod_base = OTHER; note = 2-fluororibose guanine
  modified_base 2..3: mod_base = OTHER; note = R-phosphorothioate
  modified_base 3: mod_base = OTHER; note = 2-O-methylribose adenine
  modified_base 4: mod_base = cm
  modified_base 5: mod_base = OTHER; note = 2-O-methylribose adenine
  modified_base 6: mod_base = OTHER; note = 2-fluororibose uracil
  modified_base 7: mod_base = gm
  modified_base 8: mod_base = OTHER; note = 2-O-methylribose adenine
  modified_base 9: mod_base = gm
  modified_base 10: mod_base = gm
  modified_base 10..11: mod_base = OTHER; note R-N-(1,3-dimethylimidazolidin-2-ylidene)phosphoramidate
  modified_base 11: mod_base = OTHER; note = 2-fluororibose uracil
  modified_base 12: mod_base = um
  modified_base 13: mod_base = um
  modified_base 14: mod_base = OTHER; note = 2-fluororibose uracil
  modified_base 15: mod_base = gm
  modified_base 16: mod_base = OTHER; note = 2-fluororibose adenine
  modified_base 17: mod_base = um
  modified_base 18: mod_base = OTHER; note = 2-O-methylribose adenine
  modified_base 19: mod_base = cm
  modified_base 20: mod_base = cm
  modified_base 21: mod_base = OTHER; note = 2-O-methylribose adenine
  modified_base 21..22: mod_base = OTHER; note = S-phosphorothioate
  modified_base 22: mod_base = um
  modified_base 22..23: mod_base = OTHER; note = S-phosphorothioate
  modified_base 23: mod_base = um
  source 1..23: mol_type = other RNA
tgacatgaggttttgataccatt

SEQ ID NO: 1004 - RNA, 23 nt, synthetic construct
  misc_feature 1..23: note = Synthetic: WV-49592
  misc_feature 1..23: note = Synthetic: SSR-0105100
  modified_base 1: mod_base = um
  modified_base 1..2: mod_base = OTHER; note = phosphorothioate
  modified_base 2: mod_base = OTHER; note = 2-fluororibose guanine
  modified_base 2..3: mod_base = OTHER; note = phosphorothioate
  modified_base 3: mod_base = OTHER; note = 2-O-methylribose adenine
  modified_base 3..4: mod_base = OTHER; note = N-(1,3-dimethylimidazolidin-2-ylidene)phosphoramidate
  modified_base 4: mod_base = OTHER; note = 2-fluororibose cytosine
  modified_base 5: mod_base = OTHER; note = 2-O-methylribose adenine
  modified_base 6: mod_base = OTHER; note = 2-fluororibose uracil
  modified_base 7: mod_base = gm
  modified_base 8: mod_base = OTHER; note = 2-O-methylribose adenine
  modified_base 9: mod_base = gm
  modified_base 10: mod_base = gm
  modified_base 10..11: mod_base = OTHER; note = N-(1,3-dimethylimidazolidin-2-ylidene)phosphoramidate
  modified_base 11: mod_base = OTHER; note = 2-fluororibose uracil
  modified_base 12: mod_base = um
  modified_base 13: mod_base = um
  modified_base 14: mod_base = OTHER; note = 2-fluororibose uracil
  modified_base 15: mod_base = gm
  modified_base 16: mod_base = OTHER; note = 2-fluororibose adenine
  modified_base 17: mod_base = um
  modified_base 18: mod_base = OTHER; note = 2-O-methylribose adenine
  modified_base 19: mod_base = cm
  modified_base 20: mod_base = cm
  modified_base 21: mod_base = OTHER; note = 2-O-methylribose adenine
  modified_base 21..22: mod_base = OTHER; note = phosphorothioate
  modified_base 22: mod_base = um
  modified_base 22..23: mod_base = OTHER; note = phosphorothioate
  modified_base 23: mod_base = um
  source 1..23: mol_type = other RNA
tgacatgaggttttgataccatt

SEQ ID NO: 1005 - RNA, 23 nt, synthetic construct
  misc_feature 1..23: note = Synthetic: WV-49593
  misc_feature 1..23: note = Synthetic: SSR-0105101
  modified_base 1: mod_base = um
  modified_base 1..2: mod_base = OTHER; note = phosphorothioate
  modified_base 2: mod_base = OTHER; note = 2-fluororibose guanine
  modified_base 2..3: mod_base = OTHER; note = phosphorothioate
  modified_base 3: mod_base = OTHER; note = 2-O-methylribose adenine
  modified_base 4: mod_base = OTHER; note = 2-fluororibose cytosine
  modified_base 5: mod_base = OTHER; note = 2-O-methylribose adenine
  modified_base 6: mod_base = OTHER; note = 2-fluororibose uracil
  modified_base 7: mod_base = gm
  modified_base 8: mod_base = OTHER; note = 2-O-methylribose adenine
  modified_base 9: mod_base = gm
  modified_base 10: mod_base = gm
  modified_base 11: mod_base = OTHER; note = 2-fluororibose uracil
  modified_base 12: mod_base = um
  modified_base 13: mod_base = um
  modified_base 14: mod_base = OTHER; note = 2-fluororibose uracil
  modified_base 15: mod_base = gm
  modified_base 16: mod_base = OTHER; note = 2-fluororibose adenine
  modified_base 17: mod_base = um
  modified_base 18: mod_base = OTHER; note = 2-O-methylribose adenine
  modified_base 19: mod_base = cm
  modified_base 20: mod_base = cm
  modified_base 21: mod_base = OTHER; note = 2-O-methylribose adenine
  modified_base 21..22: mod_base = OTHER; note = phosphorothioate
  modified_base 22: mod_base = um
  modified_base 22..23: mod_base = OTHER; note = phosphorothioate
  modified_base 23: mod_base = um
  source 1..23: mol_type = other RNA
tgacatgaggttttgataccatt

SEQ ID NO: 1006 - RNA, 23 nt, synthetic construct
  misc_feature 1..23: note = Synthetic: WV-49614
  misc_feature 1..23: note = Synthetic: SSR-0105217
  modified_base 1: mod_base = um
  modified_base 1..2: mod_base = OTHER; note = S-phosphorothioate
  modified_base 2: mod_base = OTHER; note = 2-fluororibose cytosine
  modified_base 2..3: mod_base = OTHER; note = R-phosphorothioate
  modified_base 3: mod_base = cm
  modified_base 3..4: mod_base = OTHER; note S-N-(1,3-dimethylimidazolidin-2-ylidene)phosphoramidate
  modified_base 4: mod_base = OTHER; note = 2-fluororibose uracil
  modified_base 5: mod_base = um
  modified_base 6: mod_base = OTHER; note = 2-fluororibose cytosine
  modified_base 7: mod_base = cm
  modified_base 8: mod_base = cm
  modified_base 9: mod_base = um
  modified_base 10: mod_base = gm
  modified_base 10..11: mod_base = OTHER; note R-N-(1,3-dimethylimidazolidin-2-ylidene)phosphoramidate
  modified_base 11: mod_base = OTHER; note = 2-fluororibose adenine
  modified_base 12: mod_base = OTHER; note = 2-O-methylribose adenine
  modified_base 13: mod_base = gm
  modified_base 14: mod_base = OTHER; note = 2-fluororibose guanine
  modified_base 15: mod_base = um
  modified_base 16: mod_base = OTHER; note = 2-fluororibose uracil
  modified_base 17: mod_base = cm
  modified_base 18: mod_base = cm
  modified_base 19: mod_base = um
  modified_base 20: mod_base = cm
  modified_base 21: mod_base = cm
  modified_base 21..22: mod_base = OTHER; note = S-phosphorothioate
  modified_base 22: mod_base = um
  modified_base 22..23: mod_base = OTHER; note = S-phosphorothioate
  modified_base 23: mod_base = um
  source 1..23: mol_type = other RNA
tccttccctgaaggttcctcctt

SEQ ID NO: 1007 - RNA, 21 nt, synthetic construct
  misc_feature 1..21: note = Synthetic: WV-49615
  misc_feature 1..21: note = Synthetic: SSR-0105234
  modified_base 1: mod_base = OTHER; note = triantennary GalNAc with C12 linker linked to 6-aminohexanol linked by phosphate to the 5' end of 2-O-methylribose guanine
  modified_base 1..2: mod_base = OTHER; note = S-phosphorothioate
  modified_base 2: mod_base = gm
  modified_base 3: mod_base = OTHER; note = 2-O-methylribose adenine
  modified_base 4: mod_base = gm
  modified_base 5: mod_base = gm
  modified_base 6: mod_base = OTHER; note = 2-O-methylribose adenine
  modified_base 7: mod_base = OTHER; note = 2-fluororibose adenine
  modified_base 8: mod_base = cm
  modified_base 9: mod_base = OTHER; note = 2-fluororibose cytosine
  modified_base 10: mod_base = OTHER; note = 2-fluororibose uracil
  modified_base 11: mod_base = OTHER; note = 2-fluororibose uracil
  modified_base 12: mod_base = cm
  modified_base 13: mod_base = OTHER; note = 2-O-methylribose adenine
  modified_base 14: mod_base = gm
  modified_base 15: mod_base = gm
  modified_base 16: mod_base = gm
  modified_base 17: mod_base = OTHER; note = 2-O-methylribose adenine
  modified_base 18: mod_base = OTHER; note = 2-O-methylribose adenine
  modified_base 19: mod_base = gm
  modified_base 20: mod_base = gm
  modified_base 20..21: mod_base = OTHER; note = S-phosphorothioate
  modified_base 21: mod_base = OTHER; note = 2-O-methylribose adenine
  source 1..21: mol_type = other RNA
ggaggaaccttcagggaagga
